(19) United States
(12) Patent Application Publication
(10) Pub. No.: US 2023/0203539 A1
(43) Pub. Date: Jun. 29, 2023

(54) GENE EDITING SYSTEMS COMPRISING AN RNA GUIDE TARGETING STATHMIN 2 (STMN2) AND USES THEREOF

(71) Applicant: Arbor Biotechnologies, Inc., Cambridge, MA (US)

(72) Inventors: Tia Marie DITOMMASO, Newton, MA (US); Anthony James GARRITY, Hingham, MA (US); Noah Michael JAKIMO, Cambridge, MA (US); Quinton Norman WESSELLS, Cambridge, MA (US)

(21) Appl. No.: 17/885,876

(22) Filed: Aug. 11, 2022

Related U.S. Application Data
(60) Provisional application No. 63/322,002, filed on Mar. 21, 2022.
(60) Provisional application No. 63/231,784, filed on Aug. 11, 2021.

(51) Int. Cl. C12N 15/90; C12N 15/11; C12N 9/22; C12N 15/85; C12N 5/071

(52) U.S. Cl. CPC C12N 15/907; C12N 15/11; C12N 9/22; C12N 15/85; C12N 5/0686; C12N 2310/20; C12N 2800/80; C12N 2800/107

(57) ABSTRACT

A system for genetic editing of a stathmin 2 (STMN2) gene, comprising (i) a Cas12i2 polypeptide or a first nucleic acid encoding the Cas12i2 polypeptide, and (ii) an RNA guide or a second nucleic acid encoding the RNA guide, wherein the RNA guide comprises a spacer sequence specific to a target sequence within an STMN2 gene. Also provided herein are methods for editing a STMN2 gene using the gene editing system disclosed herein and/or for treating diseases associated with the STMN2 gene.

### CROSS REFERENCE TO RELATED APPLICATIONS

[0001] This application claims the benefit under 35 U.S.C. § 119(e) of U.S. Provisional Application No. 63/231,784, filed Aug. 11, 2021, and U.S. Provisional Application No. 63/322,002, filed Mar. 21, 2022, the contents of each of which are incorporated by reference herein in their entirety.

### BACKGROUND

[0002] Clustered Regularly Interspaced Short Palindromic Repeats (CRISPR) and CRISPR-associated (Cas) genes, collectively known as CRISPR-Cas or CRISPR/Cas systems, are adaptive immune systems in archaea and bacteria that defend particular species against foreign genetic elements.

### SUMMARY OF THE PRESENT DISCLOSURE

[0003] The present disclosure is based, at least in part, on the development of a system for genetic editing of a stathmin 2 (STMN2) gene. The system involves a Cas12i polypeptide such as a Cas12i2 polypeptide and an RNA guide mediating cleavage at a genetic site within the STMN2 gene by the CRISPR nuclease polypeptide. As reported herein, the gene editing system disclosed herein has achieved successful editing of STMN2 gene with high editing efficiency and accuracy.

[0004] Without being bound by theory, the gene editing system disclosed herein may exhibit one or more of the following advantageous features. Compared to SpCas9 and Cas12a, Cas12i effectors are smaller (1033 to 1093aa) which, in conjunction with their short mature crRNA (40-43 nt), is preferable in terms of delivery and cost of synthesis. Cas12i cleavage results in larger deletions compared to the small deletions and +1 insertions induced by Cas9 cleavage. Cas12i PAM sequences also differ from those of Cas9. Therefore, larger and different portions of genetic sites of interest can be disrupted with a Cas12i polypeptide and RNA guide compared to Cas9. Using an unbiased approach of tagmentation-based tag integration site sequencing (TTISS), more potential off-target sites with a higher number of unique integration events were identified for SpCas9 compared to Cas12i2. See WO/2021/202800. Therefore, Cas12i such as Cas12i2 may be more specific than Cas9.

[0005] Accordingly, provided herein are gene editing systems for editing a STMN2 gene, pharmaceutical compositions or kits comprising such, methods of using the gene editing systems to produce genetically modified cells, and the resultant cells thus produced. Also provided herein are uses of the gene editing systems disclosed herein, the pharmaceutical compositions and kits comprising such, and/or the genetically modified cells thus produced for treating neurodegenerative diseases (e.g., amyotrophic lateral sclerosis (ALS) or frontotemporal dementia (FTD)) in a subject.

[0006] In some aspects, the present disclosure features system for genetic editing of a stathmin 2 (STMN2) gene, comprising (i) a Cas12i polypeptide or a first nucleic acid encoding the Cas12i polypeptide, and (ii) an RNA guide or a second nucleic acid encoding the RNA guide. The RNA guide comprises a spacer sequence specific to a target sequence within an STMN2 gene, the target sequence being adjacent to a protospacer adjacent motif (PAM) comprising the motif of 5′-TTN-3′, which is located 5′ to the target sequence.

[0007] In some embodiments, the Cas12i is a Cas12i2 polypeptide. In other embodiments, the Cas12i is a Cas12i4 polypeptide.

[0008] In some embodiments, the Cas12i polypeptide is a Cas12i2 polypeptide comprising an amino acid sequence at least 95% identical to SEQ ID NO: 448. In some instances, the Cas12i2 polypeptide may comprise one or more mutations relative to SEQ ID NO: 448. In some examples, the one or more mutations in the Cas12i2 polypeptide are at positions D581, G624, F626, P868, 1926, V1030, E1035, and/or S1046 of SEQ ID NO: 448. In some examples, the one or more mutations are amino acid substitutions, which optionally is D581R, G624R, F626R, P868T, I926R, V1030G, E1035R, 51046G, or a combination thereof.

[0009] In one example, the Cas12i2 polypeptide comprises mutations at positions D581, D911, 1926, and V1030 (e.g., amino acid substitutions of D581R, D911R, I926R, and V1030G). In another example, the Cas12i2 polypeptide comprises mutations at positions D581, 1926, and V1030 (e.g., amino acid substitutions of D581R, I926R, and V1030G). In yet another example, the Cas12i2 polypeptide comprises mutations at positions D581, 1926, V1030, and 51046 (e.g., amino acid substitutions of D581R, I926R, V1030G, and 51046G). In still another example, the Cas12i2 polypeptide comprises mutations at positions D581, G624, F626, 1926, V1030, E1035, and 51046 (e.g., amino acid substitutions of D581R, G624R, F626R, I926R, V1030G, E1035R, and S1046G). In another example, the Cas12i2 polypeptide comprises mutations at positions D581, G624, F626, P868, 1926, V1030, E1035, and 51046 (e.g., amino acid substitutions of D581R, G624R, F626R, P868T, I926R, V1030G, E1035R, and 51046G).

[0010] Exemplary Cas12i2 polypeptides for use in any of the gene editing systems disclosed herein may comprise the amino acid sequence of any one of SEQ ID NOs: 449-453. In one example, the exemplary Cas12i2 polypeptide for use in any of the gene editing systems disclosed herein comprises the amino acid sequence of SEQ ID NO: 450. In another example, the exemplary Cas12i2 polypeptide for use in any of the gene editing systems disclosed herein comprises the amino acid sequence of SEQ ID NO: 453.

[0011] In some embodiments, the gene editing system may comprise the first nucleic acid encoding the Cas12i polypeptide (e.g., the Cas12i2 polypeptide). In some instances, the first nucleic acid is located in a first vector (e.g., a viral vector such as an adeno-associated viral vector or AAV vector). In some instances, the first nucleic acid is a messenger RNA (mRNA). In some instances, the coding sequence for the Cas12i polypeptide is codon optimized.

[0012] In some embodiments, the target sequence may be within exon 1, exon 2, exon 3, exon 4, exon 5, exon 6, exon 7, or an intron of the STMN2 gene.

[0013] In some embodiments, the RNA guide comprises the sequence of any one of SEQ ID NOs: 4508, 4512, 4559, and 4561, or the second nucleic acid encodes an RNA guide comprising any one of SEQ ID NOs: 4508, 4512, 4559, and 4561.

[0014] In some embodiments, the RNA guide comprises the sequence of any one of SEQ ID NOs: 4505, 4506, 4507, 4508, 4509, 4510, 4511, 4512, 4513, 4514, 4515, 4554, 4555, 4556, 4557, 4558, 4559, 4560, 4561, and 4562, or the second nucleic acid encodes an RNA guide comprising any one of SEQ ID NOs: 4505, 4506, 4507, 4508, 4509, 4510, 4511, 4512, 4513, 4514, 4515, 4554, 4555, 4556, 4557, 4558, 4559, 4560, 4561, and 4562.

[0015] In some embodiments, the spacer sequence may be 20-30-nucleotides in length. In some examples, the spacer sequence is 20-nucleotides in length.

[0016] In some embodiments, the RNA guide comprises the spacer and a direct repeat sequence. In some examples, the direct repeat sequence is 23-36-nucleotides in length. In one example, the direct repeat sequence is at least 90% identical to any one of SEQ ID NOs: 1-10 or a fragment thereof that is at least 23-nucleotides in length. In some specific examples, the direct repeat sequence is any one of SEQ ID NOs: 1-10, or a fragment thereof that is at least 23-nucleotides in length. By way of non-limiting example, the direct repeat sequence is 5′-AGAAAUCCGUCUUUCAUUGACGG-3′ (SEQ ID NO: 10).

[0017] In some embodiments, the system may comprise the second nucleic acid encoding the RNA guide. In some examples, the nucleic acid encoding the RNA guide may be located in a viral vector. In some examples, the viral vector comprises the both the first nucleic acid encoding the Cas12i polypeptide (e.g., the Cas12i2 polypeptide) and the second nucleic acid encoding the RNA guide.

[0018] In some embodiments, any of the systems described herein may comprise the first nucleic acid encoding the Cas12i polypeptide (e.g., the Cas12i2 polypeptide), which is located in a first vector, and the second nucleic acid encoding the RNA guide, which is located on a second vector. In some examples, the first and/or second vector is a viral vector. In some specific examples, the first and second vectors are the same vector.

[0019] In some embodiments, any of the systems described herein may comprise one or more lipid nanoparticles (LNPs), which encompass the Cas12i polypeptide (e.g., the Cas12i2 polypeptide) or the first nucleic acid encoding the Cas12i polypeptide, the RNA guide or the second nucleic acid encoding the RNA guide, or both.

[0020] In some embodiments, the system described herein may comprise an LNP, which encompasses the Cas12i polypeptide (e.g., the Cas12i2 polypeptide) or the first nucleic acid encoding the Cas12i polypeptide, and a viral vector comprising the second nucleic acid encoding the RNA guide. In some examples, the viral vector is an AAV vector. In other embodiments, the system described herein may comprise an LNP, which encompasses the RNA guide or the second nucleic acid encoding the RNA guide, and a viral vector comprising the first nucleic acid encoding the Cas12i polypeptide. In some examples, the viral vector is an AAV vector.

[0021] In some aspects, the present disclosure also provides a pharmaceutical composition comprising any of the gene editing systems disclosed herein, and a kit comprising the components of the gene editing system.

[0022] In other aspects, the present disclosure also features a method for editing a stathmin 2 (STMN2) gene in a cell, the method comprising contacting a host cell with any of the systems disclosed herein to genetically edit the STMN2 gene in the host cell. In some examples, the host cell is cultured in vitro. In other examples, the contacting step is performed by administering the system for editing the STMN2 gene to a subject comprising the host cell.

[0023] Also within the scope of the present disclosure is a cell comprising a disrupted a stathmin 2 (STMN2) gene, which can be produced by contacting a host cell with the system disclosed herein genetically edit the STMN2 gene in the host cell.

[0024] Still in other aspects, the present disclosure provides a method for treating neurodegenerative diseases (e.g., amyotrophic lateral sclerosis (ALS) or frontotemporal dementia (FTD)) in a subject. The method may comprise administering to a subject in need thereof any of the systems for editing a stathmin 2 (STMN2) gene or any of the cells disclosed herein.

[0025] Also provided herein is an RNA guide, comprising (i) a spacer sequence as disclosed herein that is specific to a target sequence in a stathmin 2 (STMN2) gene, wherein the target sequence is adjacent to a protospacer adjacent motif (PAM) comprising the motif of 5′-TTN-3′, which is located 5′ to the target sequence; and (ii) a direct repeat sequence.

[0026] In some embodiments, the spacer may be 20-30-nucleotidse in length. In some examples, the spacer is 20-nucleotides in length.

[0027] In some embodiments, the direct repeat sequence may be 23-36-nucleotides in length. In some examples, the direct repeat sequence is 23-nucleotides in length.

[0028] In some embodiments, the target sequence is within exon 1, exon 2, exon 3, exon 4, exon 5, exon 6, exon 7, or an intron of the STMN2 gene.

[0029] In some embodiments, the RNA guide comprises the sequence of any one of SEQ ID NOs: 4508, 4512, 4559, and 4561, or the second nucleic acid encodes an RNA guide comprising any one of SEQ ID NOs: 4508, 4512, 4559, and 4561.

[0030] In some embodiments, the RNA guide comprises the sequence of any one of SEQ ID NOs: 4505, 4506, 4507, 4508, 4509, 4510, 4511, 4512, 4513, 4514, 4515, 4554, 4555, 4556, 4557, 4558, 4559, 4560, 4561, and 4562, or the second nucleic acid encodes an RNA guide comprising any one of SEQ ID NOs: 4505, 4506, 4507, 4508, 4509, 4510, 4511, 4512, 4513, 4514, 4515, 4554, 4555, 4556, 4557, 4558, 4559, 4560, 4561, and 4562.

[0031] In some embodiments, the direct repeat sequence may be at least 90% identical to any one of SEQ ID NOs: 1-10 or a fragment thereof that is at least 23-nucleotides in length. In some examples, the direct repeat sequence is any one of SEQ ID NOs: 1-10, or a fragment thereof that is at least 23-nucleotides in length. By way of non-limiting example, the direct repeat sequence is 5′-AGAAAUCCGUCUUUCAUUGACGG-3′ (SEQ ID NO: 10).

[0032] Also provided herein are any of the gene editing systems disclosed herein, pharmaceutical compositions or kits comprising such, or genetically modified cells generated by the gene editing system for use in treating neurodegenerative disease (e.g., amyotrophic lateral sclerosis (ALS) or frontotemporal dementia (FTD)) in a subject, as well as uses of the gene editing systems disclosed herein, pharmaceutical compositions or kits comprising such, or genetically modified cells generated by the gene editing system for manufacturing a medicament for treatment of neurodegenerative disease (e.g., amyotrophic lateral sclerosis (ALS) or frontotemporal dementia (FTD)) in a subject.

[0033] The details of one or more embodiments of the invention are set forth in the description below. Other features or advantages of the present invention will be apparent from the following drawings and detailed description of several embodiments, and also from the appended claims.

### BRIEF DESCRIPTION OF THE DRAWINGS

[0034] The following drawings form part of the present specification and are included to further demonstrate certain aspects of the present disclosure, which can be better understood by reference to the drawing in combination with the detailed description of specific embodiments presented herein.

[0035] FIG. 1 shows editing percentage of STMN2 intron target sequences by the indicated guides, as described in Example 1.

[0036] FIG. 2A shows disruption of >15% of the cryptic splice site in STMN2 intron 1 by guides 4, 8, 55, and 57.

[0037] FIG. 2B shows disruption of >15% of at least one of 3 TDP-43 binding motifs in STMN2 intron 1 by guides 12, 46, 47, 48, and 49.

[0038] FIG. 2C shows disruption of >15% of the premature polyadenylation signal in STMN2 intron 1 by guides 17 and 18.

[0039] FIG. 3 is a schematic showing the positions where each of the indicated RNA guides binds intron 1 of STMN2 relative to the positions of the cryptic splice site, the TDP-43 binding motifs, and the premature polyadenylation signal.

[0040] FIG. 4 shows indel activity of the tested RNA guides in SH-SY5Y cells.

[0041] FIG. 5A is a plot comparing indel activity (% indels) demonstrated in HEK293T cells and SH-SY5Y cells from Example 1 and Example 2, respectively. FIG. 5B is a plot comparing splice site motif disruption demonstrated in HEK293T cells and SH-SY5Y cells from Example 1 and Example 2, respectively.

### DETAILED DESCRIPTION

[0042] The present disclosure relates to a system for genetic editing of a stathmin 2 (STMN2) gene, which comprises (i) a Cas12i polypeptide or a first nucleic acid encoding the Cas12i2 polypeptide; and (ii) an RNA guide or a second nucleic acid encoding the RNA guide, wherein the RNA guide comprises a spacer sequence specific to a target sequence within a STMN2 gene, the target sequence being adjacent to a protospacer adjacent motif (PAM) comprising the motif of 5′-TTN-3′, which is located 5′ to the target sequence. Also provided in the present disclosure are a pharmaceutical composition or a kit comprising such a system as well as uses thereof. Further disclosed herein are a method for editing a STMN2 gene in a cell, a cell so produced that comprises a disrupted a STMN2 gene, a method of treating neurodegenerative disease in a subject, and an RNA guide that comprises (i) a spacer sequence that is specific to a target sequence in a STMN2 gene, wherein the target sequence is adjacent to a protospacer adjacent motif (PAM) comprising the motif of 5′-TTN-3′, which is located 5′ to the target sequence; and (ii) a direct repeat sequence, as well as uses thereof.

[0043] The Cas12i polypeptide for use in the gene editing system disclosed herein may be a Cas12i2 polypeptide, e.g., a wild-type Cas12i polypeptide or a variant thereof as those disclosed herein. In some examples, the Cas12i2 polypeptide comprises an amino acid sequence at least 95% identical to SEQ ID NO: 448 and comprises one or more mutations relative to SEQ ID NO: 448. In other examples, the Cas12i polypeptide may be a Cas12i4 polypeptide, which is also disclosed herein.

### Definitions

[0044] The present disclosure will be described with respect to particular embodiments and with reference to certain Figures, but the present disclosure is not limited thereto but only by the claims. Terms as set forth hereinafter are generally to be understood in their common sense unless indicated otherwise.

[0045] As used herein, the term “activity” refers to a biological activity. In some embodiments, activity includes enzymatic activity, e.g., catalytic ability of a Cas12i polypeptide. For example, activity can include nuclease activity.

[0046] As used herein the term “STMN2” refers to “stathmin-2.” STMN2 is a neuron-specific member of the stathmin family of proteins and plays roles in regulation of microtubule stability and signal transduction. SEQ ID NO: 454 as set forth herein provides an example of a STMN2 gene sequence. Reference is also made to Gene ID: 11075 for this sequence (www.ncbi.nlm.nih.gov/gene/11075).

[0047] As used herein, the term “Cas12i polypeptide” (also referred to herein as Cas12i) refers to a polypeptide that binds to a target sequence on a target nucleic acid specified by an RNA guide, wherein the polypeptide has at least some amino acid sequence homology to a wild-type Cas12i polypeptide. In some embodiments, the Cas12i polypeptide comprises at least 75%, at least 80%, at least 81%, at least 82%, at least 83%, at least 84%, at least 85%, at least 90%, at least 91%, at least 92%, at least 93%, at least 94%, at least 95%, at least 96%, at least 97%, at least 98%, at least 99% or 100% sequence identity with any one of SEQ ID NOs: 1-5 and 11-18 of U.S. Pat. No. 10,808,245, which is incorporated by reference for the subject matter and purpose referenced herein. In some embodiments, a Cas12i polypeptide comprises at least 75%, at least 80%, at least 81%, at least 82%, at least 83%, at least 84%, at least 85%, at least 90%, at least 91%, at least 92%, at least 93%, at least 94%, at least 95%, at least 96%, at least 97%, at least 98%, at least 99% or 100% sequence identity with any one of SEQ ID NOs: 4503, 448, 4504, and 482 of the present application. In some embodiments, a Cas12i polypeptide of the disclosure is a Cas12i2 polypeptide as described in WO/2021/202800, the relevant disclosures of which are incorporated by reference for the subject matter and purpose referenced herein. In some embodiments, the Cas12i polypeptide cleaves a target nucleic acid (e.g., as a nick or a double strand break).

[0048] As used herein, the term “adjacent to” refers to a nucleotide or amino acid sequence in close proximity to another nucleotide or amino acid sequence. In some embodiments, a nucleotide sequence is adjacent to another nucleotide sequence if no nucleotides separate the two sequences (i.e., immediately adjacent). In some embodiments, a nucleotide sequence is adjacent to another nucleotide sequence if a small number of nucleotides separate the two sequences (e.g., about 1, 2, 3, 4, 5, 6, 7, 8, 9, 10, 11, 12, 13, 14, 15, 16, 17, 18, 19, or 20 nucleotides). In some embodiments, a first sequence is adjacent to a second sequence if the two sequences are separated by about 5, 6, 7, 8, 9, 10, 11, 12, 13, 14, or 15 nucleotides. In some embodiments, a first sequence is adjacent to a second sequence if the two sequences are separated by up to 2 nucleotides, up to 5 nucleotides, up to 8 nucleotides, up to 10 nucleotides, up to 12 nucleotides, or up to 15 nucleotides. In some embodiments, a first sequence is adjacent to a second sequence if the two sequences are separated by 2-5 nucleotides, 4-6 nucleotides, 4-8 nucleotides, 4-10 nucleotides, 6-8 nucleotides, 6-10 nucleotides, 6-12 nucleotides, 8-10 nucleotides, 8-12 nucleotides, 10-12 nucleotides, 10-15 nucleotides, or 12-15 nucleotides.

[0049] As used herein, the term “complex” refers to a grouping of two or more molecules. In some embodiments, the complex comprises a polypeptide and a nucleic acid molecule interacting with (e.g., binding to, coming into contact with, adhering to) one another. For example, the term “complex” can refer to a grouping of an RNA guide and a polypeptide (e.g., a Cas12i polypeptide). Alternatively, the term “complex” can refer to a grouping of an RNA guide, a polypeptide, and the complementary region of a target sequence. As used herein, the term “complex” can refer to a grouping of a STMN2-targeting RNA guide and a Cas12i polypeptide.

[0050] As used herein, the term “protospacer adjacent motif” or “PAM” refers to a DNA sequence adjacent to a target sequence (e.g., a STMN2 target sequence). In a double-stranded DNA molecule, the strand containing the PAM motif is called the “PAM-strand” and the complementary strand is called the “non-PAM strand.” The RNA guide binds to a site in the non-PAM strand that is complementary to a target sequence disclosed herein.

[0051] In some embodiments, the PAM strand is a coding (e.g., sense) strand. In other embodiments, the PAM strand is a non-coding (e.g., antisense strand). Since an RNA guide binds the non-PAM strand via base-pairing, the non-PAM strand is also known as the target strand, while the PAM strand is also known as the non-target strand.

[0052] As used herein, the term “target sequence” refers to a DNA fragment adjacent to a PAM motif (on the PAM strand). The complementary region of the target sequence is on the non-PAM strand. A target sequence may be immediately adjacent to the PAM motif. Alternatively, the target sequence and the PAM may be separately by a small sequence segment (e.g., up to 5 nucleotides, for example, up to 4, 3, 2, or 1 nucleotide). A target sequence may be located at the 3′ end of the PAM motif or at the 5′ end of the PAM motif, depending upon the CRISPR nuclease that recognizes the PAM motif, which is known in the art. For example, a target sequence is located at the 3′ end of a PAM motif for a Cas12i polypeptide (e.g., a Cas12i2 polypeptide such as those disclosed herein). In some embodiments, the target sequence is a sequence within a STMN2 gene sequence, including, but not limited, to the sequence set forth in SEQ ID NO: 454.

[0053] As used herein, the term “spacer” or “spacer sequence” is a portion in an RNA guide that is the RNA equivalent of the target sequence (a DNA sequence). The spacer contains a sequence capable of binding to the non-PAM strand via base-pairing at the site complementary to the target sequence (in the PAM strand). Such a spacer is also known as specific to the target sequence. In some instances, the spacer may be at least 75% identical to the target sequence (e.g., at least 80%, at least 85%, at least 90%, at least 95%, at least 98%, or at least 99%), except for the RNA-DNA sequence difference. In some instances, the spacer may be 100% identical to the target sequence except for the RNA-DNA sequence difference.

[0054] As used herein, the term “RNA guide” or “RNA guide sequence” refers to any RNA molecule or a modified RNA molecule that facilitates the targeting of a polypeptide (e.g., a Cas12i polypeptide) described herein to a target sequence (e.g., a sequence of a STMN2 gene). For example, an RNA guide can be a molecule that is designed to be complementary to a specific nucleic acid sequence (a target sequence such as a target sequence within a STMN2 gene). An RNA guide may comprise a spacer sequence and a direct repeat (DR) sequence. In some instances, the RNA guide can be a modified RNA molecule comprising one or more deoxyribonucleotides, for example, in a DNA-binding sequence contained in the RNA guide, which binds a sequence complementary to the target sequence. In some examples, the DNA-binding sequence may contain a DNA sequence or a DNA/RNA hybrid sequence. The terms CRISPR RNA (crRNA), pre-crRNA, and mature crRNA are also used herein to refer to an RNA guide.

[0055] As used herein, the term “complementary” refers to a first polynucleotide (e.g., a spacer sequence of an RNA guide) that has a certain level of complementarity to a second polynucleotide (e.g., the complementary sequence of a target sequence) such that the first and second polynucleotides can form a double-stranded complex via base-pairing to permit an effector polypeptide that is complexed with the first polynucleotide to act on (e.g., cleave) the second polynucleotide. In some embodiments, the first polynucleotide may be substantially complementary to the second polynucleotide, i.e., having at least about 80%, 81%, 82%, 83%, 84%, 85%, 86%, 87%, 88%, 89%, 90%, 91%, 92%, 93%, 94%, 95%, 96%, 97%, 98%, or 99% complementarity to the second polynucleotide. In some embodiments, the first polynucleotide is completely complementary to the second polynucleotide, i.e., having 100% complementarity to the second polynucleotide.

[0056] The “percent identity” (a.k.a., sequence identity) of two nucleic acids or of two amino acid sequences is determined using the algorithm of Karlin and Altschul Proc. Natl. Acad. Sci. USA 87:2264-68, 1990, modified as in Karlin and Altschul Proc. Natl. Acad. Sci. USA 90:5873-77, 1993. Such an algorithm is incorporated into the NBLAST and XBLAST programs (version 2.0) of Altschul, et al. J. Mol. Biol. 215:403-10, 1990. BLAST nucleotide searches can be performed with the NBLAST program, score=100, wordlength-12 to obtain nucleotide sequences homologous to the nucleic acid molecules of the present disclosure. BLAST protein searches can be performed with the XBLAST program, score=50, word length=3 to obtain amino acid sequences homologous to the protein molecules of the present disclosure. Where gaps exist between two sequences, Gapped BLAST can be utilized as described in Altschul et al., Nucleic Acids Res. 25(17):3389-3402, 1997. When utilizing BLAST and Gapped BLAST programs, the default parameters of the respective programs (e.g., XBLAST and NBLAST) can be used.

[0057] As used herein, the term “edit” refers to one or more modifications introduced into a target nucleic acid, e.g., within the STMN2 gene. The edit can be one or more substitutions, one or more insertions, one or more deletions, or a combination thereof. As used herein, the term “substitution” refers to a replacement of a nucleotide or nucleotides with a different nucleotide or nucleotides, relative to a reference sequence. As used herein, the term “insertion” refers to a gain of a nucleotide or nucleotides in a nucleic acid sequence, relative to a reference sequence. As used herein, the term “deletion” refers to a loss of a nucleotide or nucleotides in a nucleic acid sequence, relative to a reference sequence.

[0058] No particular process is implied in how to make a sequence comprising a deletion. For instance, a sequence comprising a deletion can be synthesized directly from individual nucleotides. In other embodiments, a deletion is made by providing and then altering a reference sequence. The nucleic acid sequence can be in a genome of an organism. The nucleic acid sequence can be in a cell. The nucleic acid sequence can be a DNA sequence. The deletion can be a frameshift mutation or a non-frameshift mutation. A deletion described herein refers to a deletion of up to several kilobases.

[0059] As used herein, the terms “upstream” and “downstream” refer to relative positions within a single nucleic acid (e.g., DNA) sequence in a nucleic acid molecule. “Upstream” and “downstream” relate to the 5′ to 3′ direction, respectively, in which RNA transcription occurs. A first sequence is upstream of a second sequence when the 3′ end of the first sequence occurs before the 5′ end of the second sequence. A first sequence is downstream of a second sequence when the 5′ end of the first sequence occurs after the 3′ end of the second sequence. In some embodiments, the 5′-NTTN-3′ or 5′-TTN-3′ sequence is upstream of an indel described herein, and a Cas12i-induced indel is downstream of the 5′-NTTN-3′ or 5′-TTN-3′ sequence.

### I. Gene Editing Systems

[0060] In some aspects, the present disclosure provides gene editing systems comprising an RNA guide targeting a STMN2 gene. Such a gene editing system can be used to edit the STMN2 target gene, e.g., to disrupt the STMN2 gene.

[0061] As used herein the term “STMN2” refers to “stathmin-2.” STMN2 is a neuron-specific member of the stathmin family of proteins and plays roles in regulation of microtubule stability and signal transduction. SEQ ID NO: 454 as set forth herein provides an example of a STMN2 gene sequence. Reference is also made to Gene ID: 11075 for this sequence (www.ncbi.nlm.nih.gov/gene/11075).

[0062] In some embodiments, the RNA guide is comprised of a direct repeat component and a spacer sequence. In some embodiments, the RNA guide binds a Cas12i polypeptide. In some embodiments, the spacer sequence is specific to a STMN2 target sequence, wherein the STMN2 target sequence is adjacent to a 5′-NTTN-3′ or 5′-TTN-3′ PAM sequence as described herein. In the case of a double-stranded target, the RNA guide binds to a first strand of the target (i.e., the non-PAM strand) and a PAM sequence as described herein is present in the second, complementary strand (i.e., the PAM strand).

[0063] In some embodiments, the present disclosure provides compositions comprising a complex, wherein the complex comprises an RNA guide targeting a STMN2. In some embodiments, the present disclosure comprises a complex comprising an RNA guide and a Cas12i polypeptide. In some embodiments, the RNA guide and the Cas12i polypeptide bind to each other in a molar ratio of about 1:1. In some embodiments, a complex comprising an RNA guide and a Cas12i polypeptide binds to the complementary region of a target sequence within a STMN2 gene. In some embodiments, a complex comprising an RNA guide targeting a STMN2 and a Cas12i polypeptide binds to the complementary region of a target sequence within the STMN2 gene at a molar ratio of about 1:1. In some embodiments, the complex comprises enzymatic activity, such as nuclease activity, that can cleave the STMN2 target sequence and/or the complementary sequence. The RNA guide, the Cas12i polypeptide, and the complementary region of the STMN2 target sequence, either alone or together, do not naturally occur. In some embodiments, the RNA guide in the complex comprises a direct repeat and/or a spacer sequence described herein.

[0064] In some embodiments, the present disclosure comprises compositions comprising an RNA guide as described herein and/or an RNA encoding a Cas12i polypeptide as described herein. In some embodiments, the RNA guide and the RNA encoding a Cas12i polypeptide are comprised together within the same composition. In some embodiments, the RNA guide and the RNA encoding a Cas12i polypeptide are comprised within separate compositions. In some embodiments, the RNA guide comprises a direct repeat and/or a spacer sequence described herein.

[0065] Use of the gene editing systems disclosed herein has advantages over those of other known nuclease systems. Cas12i polypeptides are smaller than other nucleases. For example, Cas12i2 is 1,054 amino acids in length, whereas S. pyogenes Cas9 (SpCas9) is 1,368 amino acids in length, S. thermophilus Cas9 (StCas9) is 1,128 amino acids in length, FnCpfl is 1,300 amino acids in length, AsCpfl is 1,307 amino acids in length, and LbCpfl is 1,246 amino acids in length. Cas12i RNA guides, which do not require a trans-activating CRISPR RNA (tracrRNA), are also smaller than Cas9 RNA guides. The smaller Cas12i polypeptide and RNA guide sizes are beneficial for delivery. Compositions comprising a Cas12i polypeptide also demonstrate decreased off-target activity compared to compositions comprising an SpCas9 polypeptide. See, WO/2021/202800, the relevant disclosures of which are incorporated by reference for the subject matter and purpose referenced herein. Furthermore, indels induced by compositions comprising a Cas12i polypeptide differ from indels induced by compositions comprising an SpCas9 polypeptide. For example, SpCas9 polypeptides primarily induce insertions and deletions of 1 nucleotide in length. However, Cas12i polypeptides induce larger deletions, which can be beneficial in disrupting a larger portion of a gene such as STMN2.

[0066] Also provided herein is a system for genetic editing of a STMN2 gene, which comprises (i) a Cas12i polypeptide (e.g., a Cas12i2 polypeptide) or a first nucleic acid encoding the Cas12i polypeptide (e.g., a Cas12i2 polypeptide comprises an amino acid sequence at least 95% identical to SEQ ID NO: 448, which may and comprises one or more mutations relative to SEQ ID NO: 448); and (ii) an RNA guide or a second nucleic acid encoding the RNA guide, wherein the RNA guide comprises a spacer sequence specific to a target sequence within the STMN2 gene (e.g., within exon 1, exon 2, exon 3, exon 4, exon 5, exon 6, exon 7, or an intron of the STMN2 gene), the target sequence being adjacent to a protospacer adjacent motif (PAM) comprising the motif of 5′-TTN-3′ (5′-NTTN-3′), which is located 5′ to the target sequence.

[0067] A. RNA Guides

[0068] In some embodiments, the gene editing system described herein comprises an RNA guide targeting a STMN2 gene, for example, targeting exon 1, exon 2, exon 3, exon 4, exon 5, exon 6, exon 7, or an intron of the STMN2 gene. In some embodiments, the gene editing system described herein may comprise two or more (e.g., 2, 3, 4, 5, 6, 7, 8, 9, or more) RNA guides targeting STMN2.

[0069] The RNA guide may direct the Cas12i polypeptide contained in the gene editing system as described herein to an STMN2 target sequence. Two or more RNA guides may direct two or more separate Cas12i polypeptides (e.g., Cas12i polypeptides having the same or different sequence) as described herein to two or more (e.g., 2, 3, 4, 5, 6, 7, 8, 9, or more) STMN2 target sequences. Those skilled in the art reading the below examples of particular kinds of RNA guides will understand that, in some embodiments, an RNA guide is STMN2 target-specific. That is, in some embodiments, an RNA guide binds specifically to one or more STMN2 target sequences (e.g., within a cell) and not to non-targeted sequences (e.g., non-specific DNA or random sequences within the same cell).

[0070] In some embodiments, the RNA guide comprises a spacer sequence followed by a direct repeat sequence, referring to the sequences in the 5′ to 3′ direction. In some embodiments, the RNA guide comprises a first direct repeat sequence followed by a spacer sequence and a second direct repeat sequence, referring to the sequences in the 5′ to 3′ direction. In some embodiments, the first and second direct repeats of such an RNA guide are identical. In some embodiments, the first and second direct repeats of such an RNA guide are different.

[0071] In some embodiments, the spacer sequence and the direct repeat sequence(s) of the RNA guide are present within the same RNA molecule. In some embodiments, the spacer and direct repeat sequences are linked directly to one another. In some embodiments, a short linker is present between the spacer and direct repeat sequences, e.g., an RNA linker of 1, 2, or 3 nucleotides in length. In some embodiments, the spacer sequence and the direct repeat sequence(s) of the RNA guide are present in separate molecules, which are joined to one another by base pairing interactions.

[0072] Additional information regarding exemplary direct repeat and spacer components of RNA guides is provided as follows.

[0073] (i). Direct Repeat

[0074] In some embodiments, the RNA guide comprises a direct repeat sequence. In some embodiments, the direct repeat sequence of the RNA guide has a length of between 12-100, 13-75, 14-50, or 15-40 nucleotides (e.g., 15, 16, 17, 18, 19, 20, 21, 22, 23, 24, 25, 26, 27, 28, 29, 30, 31, 32, 33, 34, 35, 36, 37, 38, 39, or 40 nucleotides).

[0075] In some embodiments, the direct repeat sequence is a sequence of Table 1 or a portion of a sequence of Table 1. The direct repeat sequence can comprise nucleotide 1 through nucleotide 36 of any one of SEQ ID NOs: 1, 2, 3, 4, 5, 6, 7, or 8. The direct repeat sequence can comprise nucleotide 2 through nucleotide 36 of any one of SEQ ID NOs: 1, 2, 3, 4, 5, 6, 7, or 8. The direct repeat sequence can comprise nucleotide 3 through nucleotide 36 of any one of SEQ ID NOs: 1, 2, 3, 4, 5, 6, 7, or 8. The direct repeat sequence can comprise nucleotide 4 through nucleotide 36 of any one of SEQ ID NOs: 1, 2, 3, 4, 5, 6, 7, or 8. The direct repeat sequence can comprise nucleotide 5 through nucleotide 36 of any one of SEQ ID NOs: 1, 2, 3, 4, 5, 6, 7, or 8. The direct repeat sequence can comprise nucleotide 6 through nucleotide 36 of any one of SEQ ID NOs: 1, 2, 3, 4, 5, 6, 7, or 8. The direct repeat sequence can comprise nucleotide 7 through nucleotide 36 of any one of SEQ ID NOs: 1, 2, 3, 4, 5, 6, 7, or 8. The direct repeat sequence can comprise nucleotide 8 through nucleotide 36 of any one of SEQ ID NOs: 1, 2, 3, 4, 5, 6, 7, or 8. The direct repeat sequence can comprise nucleotide 9 through nucleotide 36 of any one of SEQ ID NOs: 1, 2, 3, 4, 5, 6, 7, or 8. The direct repeat sequence can comprise nucleotide 10 through nucleotide 36 of any one of SEQ ID NOs: 1, 2, 3, 4, 5, 6, 7, or 8. The direct repeat sequence can comprise nucleotide 11 through nucleotide 36 of any one of SEQ ID NOs: 1, 2, 3, 4, 5, 6, 7, or 8. The direct repeat sequence can comprise nucleotide 12 through nucleotide 36 of any one of SEQ ID NOs: 1, 2, 3, 4, 5, 6, 7, or 8. The direct repeat sequence can comprise nucleotide 13 through nucleotide 36 of any one of SEQ ID NOs: 1, 2, 3, 4, 5, 6, 7, or 8. The direct repeat sequence can comprise nucleotide 14 through nucleotide 36 of any one of SEQ ID NOs: 1, 2, 3, 4, 5, 6, 7, or 8. The direct repeat sequence can comprise nucleotide 1 through nucleotide 34 of SEQ ID NO: 9. The direct repeat sequence can comprise nucleotide 2 through nucleotide 34 of SEQ ID NO: 9. The direct repeat sequence can comprise nucleotide 3 through nucleotide 34 of SEQ ID NO: 9. The direct repeat sequence can comprise nucleotide 4 through nucleotide 34 of SEQ ID NO: 9. The direct repeat sequence can comprise nucleotide 5 through nucleotide 34 of SEQ ID NO: 9. The direct repeat sequence can comprise nucleotide 6 through nucleotide 34 of SEQ ID NO: 9. The direct repeat sequence can comprise nucleotide 7 through nucleotide 34 of SEQ ID NO: 9. The direct repeat sequence can comprise nucleotide 8 through nucleotide 34 of SEQ ID NO: 9. The direct repeat sequence can comprise nucleotide 9 through nucleotide 34 of SEQ ID NO: 9. The direct repeat sequence can comprise nucleotide 10 through nucleotide 34 of SEQ ID NO: 9. The direct repeat sequence can comprise nucleotide 11 through nucleotide 34 of SEQ ID NO: 9. The direct repeat sequence can comprise nucleotide 12 through nucleotide 34 of SEQ ID NO: 9. In some embodiments, the direct repeat sequence is set forth in SEQ ID NO: 10. In some embodiments, the direct repeat sequence comprises a portion of the sequence set forth in SEQ ID NO: 10.

[0076] In some embodiments, the direct repeat sequence has at least 90% identity (e.g., at least 90%, 91%, 92%, 93%, 94%, 95%, 96%, 97%, 98% or 99% identity) to a sequence of Table 1 or a portion of a sequence of Table 1. The direct repeat sequence can have at least 90% identity to a sequence comprising nucleotide 1 through nucleotide 36 of any one of SEQ ID NOs: 1, 2, 3, 4, 5, 6, 7, or 8. The direct repeat sequence can have at least 90% identity to a sequence comprising 2 through nucleotide 36 of any one of SEQ ID NOs: 1, 2, 3, 4, 5, 6, 7, or 8. The direct repeat sequence can have at least 90% identity to a sequence comprising 3 through nucleotide 36 of any one of SEQ ID NOs: 1, 2, 3, 4, 5, 6, 7, or 8. The direct repeat sequence can have at least 90% identity to a sequence comprising 4 through nucleotide 36 of any one of SEQ ID NOs: 1, 2, 3, 4, 5, 6, 7, or 8. The direct repeat sequence can have at least 90% identity to a sequence comprising 5 through nucleotide 36 of any one of SEQ ID NOs: 1, 2, 3, 4, 5, 6, 7, or 8. The direct repeat sequence can have at least 90% identity to a sequence comprising 6 through nucleotide 36 of any one of SEQ ID NOs: 1, 2, 3, 4, 5, 6, 7, or 8. The direct repeat sequence can have at least 90% identity to a sequence comprising 7 through nucleotide 36 of any one of SEQ ID NOs: 1, 2, 3, 4, 5, 6, 7, or 8. The direct repeat sequence can have at least 90% identity to a sequence comprising 8 through nucleotide 36 of any one of SEQ ID NOs: 1, 2, 3, 4, 5, 6, 7, or 8. The direct repeat sequence can have at least 90% identity to a sequence comprising 9 through nucleotide 36 of any one of SEQ ID NOs: 1, 2, 3, 4, 5, 6, 7, or 8. The direct repeat sequence can have at least 90% identity to a sequence comprising 10 through nucleotide 36 of any one of SEQ ID NOs: 1, 2, 3, 4, 5, 6, 7, or 8. The direct repeat sequence can have at least 90% identity to a sequence comprising 11 through nucleotide 36 of any one of SEQ ID NOs: 1, 2, 3, 4, 5, 6, 7, or 8. The direct repeat sequence can have at least 90% identity to a sequence comprising 12 through nucleotide 36 of any one of SEQ ID NOs: 1, 2, 3, 4, 5, 6, 7, or 8. The direct repeat sequence can have at least 90% identity to a sequence comprising 13 through nucleotide 36 of any one of SEQ ID NOs: 1, 2, 3, 4, 5, 6, 7, or 8. The direct repeat sequence can have at least 90% identity to a sequence comprising 14 through nucleotide 36 of any one of SEQ ID NOs: 1, 2, 3, 4, 5, 6, 7, or 8. The direct repeat sequence can have at least 90% identity to a sequence comprising 1 through nucleotide 34 of SEQ ID NO: 9. The direct repeat sequence can have at least 90% identity to a sequence comprising 2 through nucleotide 34 of SEQ ID NO: 9. The direct repeat sequence can have at least 90% identity to a sequence comprising 3 through nucleotide 34 of SEQ ID NO: 9. The direct repeat sequence can have at least 90% identity to a sequence comprising 4 through nucleotide 34 of SEQ ID NO: 9. The direct repeat sequence can have at least 90% identity to a sequence comprising 5 through nucleotide 34 of SEQ ID NO: 9. The direct repeat sequence can have at least 90% identity to a sequence comprising 6 through nucleotide 34 of SEQ ID NO: 9. The direct repeat sequence can have at least 90% identity to a sequence comprising 7 through nucleotide 34 of SEQ ID NO: 9. The direct repeat sequence can have at least 90% identity to a sequence comprising 8 through nucleotide 34 of SEQ ID NO: 9. The direct repeat sequence can have at least 90% identity to a sequence comprising 9 through nucleotide 34 of SEQ ID NO: 9. The direct repeat sequence can have at least 90% identity to a sequence comprising 10 through nucleotide 34 of SEQ ID NO: 9. The direct repeat sequence can have at least 90% identity to a sequence comprising 11 through nucleotide 34 of SEQ ID NO: 9. The direct repeat sequence can have at least 90% identity to a sequence comprising 12 through nucleotide 34 of SEQ ID NO: 9. In some embodiments, the direct repeat sequence has at least 90% identity (e.g., at least 90%, 91%, 92%, 93%, 94%, 95%, 96%, 97%, 98% or 99% identity) to SEQ ID NO: 10. In some embodiments, the direct repeat sequence has at least 90% identity to a portion of the sequence set forth in SEQ ID NO: 10.

[0077] In some embodiments, compositions comprising a Cas12i2 polypeptide and an RNA guide comprising the direct repeat of SEQ ID NO: 10 and a spacer length of 20 nucleotides are capable of introducing indels into a STMN2 target sequence.

[0078] In some embodiments, the direct repeat sequence is at least 90% identical to the reverse complement of any one of SEQ ID NOs: 1-10 (see, Table 1). In some embodiments, the direct repeat sequence is the reverse complement of any one of SEQ ID NOs: 1-10.

TABLE 1
Cas12i2 Direct Repeat Sequences

| Sequence | |
|---|---|
| identifier | Direct Repeat Sequence |
| SEQ ID NO: | GUUGCAAAACCCAAGAAAUCCGUCUUUCAUUGACGG |
| 1 | |
| SEQ ID NO: | AAUAGCGGCCCUAAGAAAUCCGUCUUUCAUUGACGG |
| 2 | |
| SEQ ID NO: | AUUGGAACUGGCGAGAAAUCCGUCUUUCAUUGACGG |
| 3 | |
| SEQ ID NO: | CCAGCAACACCUAAGAAAUCCGUCUUUCAUUGACGG |
| 4 | |
| SEQ ID NO: | CGGCGCUCGAAUAGGAAAUCCGUCUUUCAUUGACGG |
| 5 | |
| SEQ ID NO: | GUGGCAACACCUAAGAAAUCCGUCUUUCAUUGACGG |
| 6 | |
| SEQ ID NO: | GUUGCAACACCUAAGAAAUCCGUCUUUCAUUGACGG |
| 7 | |
| SEQ ID NO: | GUUGCAAUGCCUAAGAAAUCCGUCUUUCAUUGACGG |
| 8 | |
| SEQ ID NO: | GCAACACCUAAGAAAUCCGUCUUUCAUUGACGGG |
| 9 | |
| SEQ ID NO: | AGAAAUCCGUCUUUCAUUGACGG |
| 10 | |

[0079] In some embodiments, the direct repeat sequence is a sequence of Table 2 or a portion of a sequence of Table 2. The direct repeat sequence can comprise nucleotide 1 through nucleotide 36 of any one of SEQ ID NOs: 462, 463, 464, 465, 466, 467, 468, 469, 470, 471, 472, 473, 474, 475, 476, 477, 478, or 479. The direct repeat sequence can comprise nucleotide 2 through nucleotide 36 of any one of SEQ ID NOs: 462, 463, 464, 465, 466, 467, 468, 469, 470, 471, 472, 473, 474, 475, 476, 477, 478, or 479. The direct repeat sequence can comprise nucleotide 3 through nucleotide 36 of any one of SEQ ID NOs: 462, 463, 464, 465, 466, 467, 468, 469, 470, 471, 472, 473, 474, 475, 476, 477, 478, or 479. The direct repeat sequence can comprise nucleotide 4 through nucleotide 36 of any one of SEQ ID NOs: 462, 463, 464, 465, 466, 467, 468, 469, 470, 471, 472, 473, 474, 475, 476, 477, 478, or 479. The direct repeat sequence can comprise nucleotide 5 through nucleotide 36 of any one of SEQ ID NOs: 462, 463, 464, 465, 466, 467, 468, 469, 470, 471, 472, 473, 474, 475, 476, 477, 478, or 479. The direct repeat sequence can comprise nucleotide 6 through nucleotide 36 of any one of SEQ ID NOs: 462, 463, 464, 465, 466, 467, 468, 469, 470, 471, 472, 473, 474, 475, 476, 477, 478, or 479. The direct repeat sequence can comprise nucleotide 7 through nucleotide 36 of any one of SEQ ID NOs: 462, 463, 464, 465, 466, 467, 468, 469, 470, 471, 472, 473, 474, 475, 476, 477, 478, or 479. The direct repeat sequence can comprise nucleotide 8 through nucleotide 36 of any one of SEQ ID NOs: 462, 463, 464, 465, 466, 467, 468, 469, 470, 471, 472, 473, 474, 475, 476, 477, 478, or 479. The direct repeat sequence can comprise nucleotide 9 through nucleotide 36 of any one of SEQ ID NOs: 462, 463, 464, 465, 466, 467, 468, 469, 470, 471, 472, 473, 474, 475, 476, 477, 478, or 479. The direct repeat sequence can comprise nucleotide 10 through nucleotide 36 of any one of SEQ ID NOs: 462, 463, 464, 465, 466, 467, 468, 469, 470, 471, 472, 473, 474, 475, 476, 477, 478, or 479. The direct repeat sequence can comprise nucleotide 11 through nucleotide 36 of any one of SEQ ID NOs: 462, 463, 464, 465, 466, 467, 468, 469, 470, 471, 472, 473, 474, 475, 476, 477, 478, or 479. The direct repeat sequence can comprise nucleotide 12 through nucleotide 36 of any one of SEQ ID NOs: 462, 463, 464, 465, 466, 467, 468, 469, 470, 471, 472, 473, 474, 475, 476, 477, 478, or 479. The direct repeat sequence can comprise nucleotide 13 through nucleotide 36 of any one of SEQ ID NOs: 462, 463, 464, 465, 466, 467, 468, 469, 470, 471, 472, 473, 474, 475, 476, 477, 478, or 479. The direct repeat sequence can comprise nucleotide 14 through nucleotide 36 of any one of SEQ ID NOs: 462, 463, 464, 465, 466, 467, 468, 469, 470, 471, 472, 473, 474, 475, 476, 477, 478, or 479.

[0080] In some embodiments, the direct repeat sequence has at least 95% identity (e.g., at least 95%, 96%, 97%, 98% or 99% identity) to a sequence of Table 2 or a portion of a sequence of Table 2. The direct repeat sequence can have at least 95% identity to a sequence comprising nucleotide 1 through nucleotide 36 of any one of SEQ ID NOs: 462, 463, 464, 465, 466, 467, 468, 469, 470, 471, 472, 473, 474, 475, 476, 477, 478, or 479. The direct repeat sequence can have at least 95% identity to a sequence comprising 2 through nucleotide 36 of any one of SEQ ID NOs: 462, 463, 464, 465, 466, 467, 468, 469, 470, 471, 472, 473, 474, 475, 476, 477, 478, or 479. The direct repeat sequence can have at least 95% identity to a sequence comprising 3 through nucleotide 36 of any one of SEQ ID NOs: 462, 463, 464, 465, 466, 467, 468, 469, 470, 471, 472, 473, 474, 475, 476, 477, 478, or 479. The direct repeat sequence can have at least 95% identity to a sequence comprising 4 through nucleotide 36 of any one of SEQ ID NOs: 462, 463, 464, 465, 466, 467, 468, 469, 470, 471, 472, 473, 474, 475, 476, 477, 478, or 479. The direct repeat sequence can have at least 95% identity to a sequence comprising 5 through nucleotide 36 of any one of SEQ ID NOs: 462, 463, 464, 465, 466, 467, 468, 469, 470, 471, 472, 473, 474, 475, 476, 477, 478, or 479. The direct repeat sequence can have at least 95% identity to a sequence comprising 6 through nucleotide 36 of any one of SEQ ID NOs: 462, 463, 464, 465, 466, 467, 468, 469, 470, 471, 472, 473, 474, 475, 476, 477, 478, or 479. The direct repeat sequence can have at least 95% identity to a sequence comprising 7 through nucleotide 36 of any one of SEQ ID NOs: 462, 463, 464, 465, 466, 467, 468, 469, 470, 471, 472, 473, 474, 475, 476, 477, 478, or 479. The direct repeat sequence can have at least 95% identity to a sequence comprising 8 through nucleotide 36 of any one of SEQ ID NOs: 462, 463, 464, 465, 466, 467, 468, 469, 470, 471, 472, 473, 474, 475, 476, 477, 478, or 479. The direct repeat sequence can have at least 95% identity to a sequence comprising 9 through nucleotide 36 of any one of SEQ ID NOs: 462, 463, 464, 465, 466, 467, 468, 469, 470, 471, 472, 473, 474, 475, 476, 477, 478, or 479. The direct repeat sequence can have at least 95% identity to a sequence comprising 10 through nucleotide 36 of any one of SEQ ID NOs: 462, 463, 464, 465, 466, 467, 468, 469, 470, 471, 472, 473, 474, 475, 476, 477, 478, or 479. The direct repeat sequence can have at least 95% identity to a sequence comprising 11 through nucleotide 36 of any one of SEQ ID NOs: 462, 463, 464, 465, 466, 467, 468, 469, 470, 471, 472, 473, 474, 475, 476, 477, 478, or 479. The direct repeat sequence can have at least 95% identity to a sequence comprising 12 through nucleotide 36 of any one of SEQ ID NOs: 462, 463, 464, 465, 466, 467, 468, 469, 470, 471, 472, 473, 474, 475, 476, 477, 478, or 479. The direct repeat sequence can have at least 95% identity to a sequence comprising 13 through nucleotide 36 of any one of SEQ ID NOs: 462, 463, 464, 465, 466, 467, 468, 469, 470, 471, 472, 473, 474, 475, 476, 477, 478, or 479.

[0081] In some embodiments, the direct repeat sequence has at least 90% identity (e.g., at least 90%, 91%, 92%, 93%, 94%, 95%, 96%, 97%, 98% or 99% identity) to a sequence of Table 2 or a portion of a sequence of Table 2. The direct repeat sequence can have at least 90% identity to a sequence comprising nucleotide 1 through nucleotide 36 of any one of SEQ ID NOs: 462, 463, 464, 465, 466, 467, 468, 469, 470, 471, 472, 473, 474, 475, 476, 477, 478, or 479. The direct repeat sequence can have at least 90% identity to a sequence comprising 2 through nucleotide 36 of any one of SEQ ID NOs: 462, 463, 464, 465, 466, 467, 468, 469, 470, 471, 472, 473, 474, 475, 476, 477, 478, or 479. The direct repeat sequence can have at least 90% identity to a sequence comprising 3 through nucleotide 36 of any one of SEQ ID NOs: 462, 463, 464, 465, 466, 467, 468, 469, 470, 471, 472, 473, 474, 475, 476, 477, 478, or 479. The direct repeat sequence can have at least 90% identity to a sequence comprising 4 through nucleotide 36 of any one of SEQ ID NOs: 462, 463, 464, 465, 466, 467, 468, 469, 470, 471, 472, 473, 474, 475, 476, 477, 478, or 479. The direct repeat sequence can have at least 90% identity to a sequence comprising 5 through nucleotide 36 of any one of SEQ ID NOs: 462, 463, 464, 465, 466, 467, 468, 469, 470, 471, 472, 473, 474, 475, 476, 477, 478, or 479. The direct repeat sequence can have at least 90% identity to a sequence comprising 6 through nucleotide 36 of any one of SEQ ID NOs: 462, 463, 464, 465, 466, 467, 468, 469, 470, 471, 472, 473, 474, 475, 476, 477, 478, or 479. The direct repeat sequence can have at least 90% identity to a sequence comprising 7 through nucleotide 36 of any one of SEQ ID NOs: 462, 463, 464, 465, 466, 467, 468, 469, 470, 471, 472, 473, 474, 475, 476, 477, 478, or 479. The direct repeat sequence can have at least 90% identity to a sequence comprising 8 through nucleotide 36 of any one of SEQ ID NOs: 462, 463, 464, 465, 466, 467, 468, 469, 470, 471, 472, 473, 474, 475, 476, 477, 478, or 479. The direct repeat sequence can have at least 90% identity to a sequence comprising 9 through nucleotide 36 of any one of SEQ ID NOs: 462, 463, 464, 465, 466, 467, 468, 469, 470, 471, 472, 473, 474, 475, 476, 477, 478, or 479. The direct repeat sequence can have at least 90% identity to a sequence comprising 10 through nucleotide 36 of any one of SEQ ID NOs: 462, 463, 464, 465, 466, 467, 468, 469, 470, 471, 472, 473, 474, 475, 476, 477, 478, or 479. The direct repeat sequence can have at least 90% identity to a sequence comprising 11 through nucleotide 36 of any one of SEQ ID NOs: 462, 463, 464, 465, 466, 467, 468, 469, 470, 471, 472, 473, 474, 475, 476, 477, 478, or 479. The direct repeat sequence can have at least 90% identity to a sequence comprising 12 through nucleotide 36 of any one of SEQ ID NOs: 462, 463, 464, 465, 466, 467, 468, 469, 470, 471, 472, 473, 474, 475, 476, 477, 478, or 479. The direct repeat sequence can have at least 90% identity to a sequence comprising 13 through nucleotide 36 of any one of SEQ ID NOs: 462, 463, 464, 465, 466, 467, 468, 469, 470, 471, 472, 473, 474, 475, 476, 477, 478, or 479.

[0082] In some embodiments, the direct repeat sequence is at least 90% identical to the reverse complement of any one of SEQ ID NOs: 462, 463, 464, 465, 466, 467, 468, 469, 470, 471, 472, 473, 474, 475, 476, 477, 478, or 479. In some embodiments, the direct repeat sequence is at least 95% identical to the reverse complement of any one of SEQ ID NOs: 462, 463, 464, 465, 466, 467, 468, 469, 470, 471, 472, 473, 474, 475, 476, 477, 478, or 479. In some embodiments, the direct repeat sequence is the reverse complement of any one of SEQ ID NOs: 462, 463, 464, 465, 466, 467, 468, 469, 470, 471, 472, 473, 474, 475, 476, 477, 478, or 479.

[0083] In some embodiments, the direct repeat sequence is at least 90% identical to SEQ ID NO: 480 or a portion of SEQ ID NO: 480. In some embodiments, the direct repeat sequence is at least 95% identical to SEQ ID NO: 480 or a portion of SEQ ID NO: 480. In some embodiments, the direct repeat sequence is 100% identical to SEQ ID NO: 480 or a portion of SEQ ID NO: 480.

TABLE 2
Cas12i4 Direct Repeat Sequences

| Sequence | |
|---|---|
| identifier | Direct Repeat Sequence |
| SEQ ID NO: | UCUCAACGAUAGUCAGACAUGUGUCCUCAGUGACAC |
| 462 | |
| SEQ ID NO: | UUUUAACAACACUCAGGCAUGUGUCCACAGUGACAC |
| 463 | |
| SEQ ID NO: | UUGAACGGAUACUCAGACAUGUGUUUCCAGUGACAC |
| 464 | |
| SEQ ID NO: | UGCCCUCAAUAGUCAGAUGUGUGUCCACAGUGACAC |
| 465 | |
| SEQ ID NO: | UCUCAAUGAUACUUAGAUACGUGUCCUCAGUGACAC |
| 466 | |
| SEQ ID NO: | UCUCAAUGAUACUCAGACAUGUGUCCCCAGUGACAC |
| 467 | |
| SEQ ID NO: | UCUCAAUGAUACUAAGACAUGUGUCCUCAGUGACAC |
| 468 | |
| SEQ ID NO: | UCUCAACUAUACUCAGACAUGUGUCCUCAGUGACAC |
| 469 | |
| SEQ ID NO: | UCUCAACGAUACUCAGACAUGUGUCCUCAGUGACAC |
| 470 | |
| SEQ ID NO: | UCUCAACGAUACUAAGAUAUGUGUCCUCAGCGACAC |
| 471 | |
| SEQ ID NO: | UCUCAACGAUACUAAGAUAUGUGUCCCCAGUGACAC |
| 472 | |
| SEQ ID NO: | UCUCAACGAUACUAAGAUAUGUGUCCACAGUGACAC |
| 473 | |
| SEQ ID NO: | UCUCAACAAUACUCAGACAUGUGUCCCCAGUGACAC |
| 474 | |
| SEQ ID NO: | UCUCAACAAUACUAAGGCAUGUGUCCCCAGUGACCC |
| 475 | |
| SEQ ID NO: | UCUCAAAGAUACUCAGACACGUGUCCCCAGUGACAC |
| 476 | |
| SEQ ID NO: | UCUCAAAAAUACUCAGACAUGUGUCCUCAGUGACAC |
| 477 | |
| SEQ ID NO: | GCGAAACAACAGUCAGACAUGUGUCCCCAGUGACAC |
| 478 | |
| SEQ ID NO: | CCUCAACGAUAUUAAGACAUGUGUCCGCAGUGACAC |
| 479 | |
| SEQ ID NO: | AGACAUGUGUCCUCAGUGACAC |
| 480 | |

[0084] In some embodiments, the direct repeat sequence is a sequence of Table 3 or a portion of a sequence of Table 3. In some embodiments, the direct repeat sequence has at least 95% identity (e.g., at least 95%, 96%, 97%, 98% or 99% identity) to a sequence of Table 3 or a portion of a sequence of Table 3. In some embodiments, the direct repeat sequence has at least 90% identity (e.g., at least 90%, 91%, 92%, 93%, 94%, 95%, 96%, 97%, 98% or 99% identity) to a sequence of Table 3 or a portion of a sequence of Table 3. In some embodiments, the direct repeat sequence is at least 90% identical to the reverse complement of any one of SEQ ID NOs: 485-487. In some embodiments, the direct repeat sequence is at least 95% identical to the reverse complement of any one of SEQ ID NOs: 485-487. In some embodiments, the direct repeat sequence is the reverse complement of any one of SEQ ID NOs: 485-487.

TABLE 3
Cas12i1 Direct Repeat Sequences

| Sequence | |
|---|---|
| identifier | Direct Repeat Sequence |
| SEQ ID NO: | GUUGGAAUGACUAAUUUUUGUGCCCACCGUUGGCAC |
| 485 | |
| SEQ ID NO: | AAUUUUUGUGCCCAUCGUUGGCAC |
| 486 | |
| SEQ ID NO: | AUUUUUGUGCCCAUCGUUGGCAC |
| 487 | |

[0085] In some embodiments, the direct repeat sequence is a sequence of Table 4 or a portion of a sequence of Table 4. In some embodiments, the direct repeat sequence has at least 95% identity (e.g., at least 95%, 96%, 97%, 98% or 99% identity) to a sequence of Table 4 or a portion of a sequence of Table 4. In some embodiments, the direct repeat sequence has at least 90% identity (e.g., at least 90%, 91%, 92%, 93%, 94%, 95%, 96%, 97%, 98% or 99% identity) to a sequence of Table 4 or a portion of a sequence of Table 4. In some embodiments, the direct repeat sequence is at least 90% identical to the reverse complement of any one of SEQ ID NOs: 488-490. In some embodiments, the direct repeat sequence is at least 95% identical to the reverse complement of any one of SEQ ID NOs: 488-490. In some embodiments, the direct repeat sequence is the reverse complement of any one of SEQ ID NOs: 488-490.

TABLE 4
Cas12i3 Direct Repeat Sequences.

| Sequence | |
|---|---|
| identifier | Direct Repeat Sequence |
| SEQ ID NO: | CUAGCAAUGACCUAAUAGUGUGUCCUUAGUUGACAU |
| 488 | |
| SEQ ID NO: | CCUACAAUACCUAAGAAAUCCGUCCUAAGUUGACGG |
| 489 | |
| SEQ ID NO: | AUAGUGUGUCCUUAGUUGACAU |
| 490 | |

[0086] In some embodiments, a direct repeat sequence described herein comprises a uracil (U). In some embodiments, a direct repeat sequence described herein comprises a thymine (T). In some embodiments, a direct repeat sequence according to Tables 1-4 comprises a sequence comprising a thymine in one or more places indicated as uracil in Tables 1-4.

[0087] (ii). Spacer Sequences

[0088] In some embodiments, the RNA guide comprises a DNA targeting or spacer sequence. In some embodiments, the spacer sequence of the RNA guide has a length of between 12-100, 13-75, 14-50, or 15-30 nucleotides (e.g., 15, 16, 17, 18, 19, 20, 21, 22, 23, 24, 25, 26, 27, 28, 29, or 30 nucleotides) and is complementary to a non-PAM strand sequence. In some embodiments, the spacer sequence is designed to be complementary to a specific DNA strand, e.g., of a genomic locus.

[0089] In some embodiments, the RNA guide spacer sequence is substantially identical to a complementary strand of a target sequence. In some embodiments, the RNA guide comprises a sequence having at least about 60%, at least about 65%, at least about 70%, at least about 75%, at least about 80%, at least about 85%, at least about 90%, at least about 91%, at least about 92%, at least about 93%, at least about 94%, at least about 95%, at least about 96%, at least about 97%, at least about 98%, at least about 99%, or at least about 99.5% sequence identity to a complementary strand of a reference nucleic acid sequence, e.g., target sequence. The percent identity between two such nucleic acids can be determined manually by inspection of the two optimally aligned nucleic acid sequences or by using software programs or algorithms (e.g., BLAST, ALIGN, CLUSTAL) using standard parameters.

[0090] In some embodiments, the RNA guide comprises a spacer sequence that has a length of between 12-100, 13-75, 14-50, or 15-30 nucleotides (e.g., 15, 16, 17, 18, 19, 20, 21, 22, 23, 24, 25, 26, 27, 28, 29, or 30 nucleotides) and at least 80%, at least 90%, at least 95%, at least 96%, at least 97%, at least 98%, at least 99% complementary to a region on the non-PAM strand that is complementary to the target sequence. In some embodiments, the RNA guide comprises a sequence at least 80%, at least 90%, at least 95%, at least 96%, at least 97%, at least 98%, at least 99% complementary to a target DNA sequence. In some embodiments, the RNA guide comprises a sequence at least 80%, at least 90%, at least 95%, at least 96%, at least 97%, at least 98%, at least 99% complementary to a target genomic sequence. In some embodiments, the RNA guide comprises a sequence, e.g., RNA sequence, that is a length of up to 50 and at least 80%, at least 90%, at least 95%, at least 96%, at least 97%, at least 98%, at least 99% complementary to a region on the non-PAM strand that is complementary to the target sequence. In some embodiments, the RNA guide comprises a sequence at least 80%, at least 90%, at least 95%, at least 96%, at least 97%, at least 98%, at least 99% complementary to a target DNA sequence. In some embodiments, the RNA guide comprises a sequence at least 80%, at least 90%, at least 95%, at least 96%, at least 97%, at least 98%, at least 99% complementary to a target genomic sequence.

[0091] In some embodiments, the spacer sequence is a sequence of Table 5A or 5B or a portion of a sequence of Table 5A or 5B. It should be understood that an indication of SEQ ID NOs: 229-446 or 2497-4502 should be considered as equivalent to a listing of SEQ ID NOs: 229-446 or 2497-4502, with each of the intervening numbers present in the listing, i.e., 229, 230, 231, 232, 233, 234, 235, 236, 237, 238, 239, 240, 241, 242, 243, 244, 245, 246, 247, 248, 249, 250, 251, 252, 253, 254, 255, 256, 257, 258, 259, 260, 261, 262, 263, 264, 265, 266, 267, 268, 269, 270, 271, 272, 273, 274, 275, 276, 277, 278, 279, 280, 281, 282, 283, 284, 285, 286, 287, 288, 289, 290, 291, 292, 293, 294, 295, 296, 297, 298, 299, 300, 301, 302, 303, 304, 305, 306, 307, 308, 309, 310, 311, 312, 313, 314, 315, 316, 317, 318, 319, 320, 321, 322, 323, 324, 325, 326, 327, 328, 329, 330, 331, 332, 333, 334, 335, 336, 337, 338, 339, 340, 341, 342, 343, 344, 345, 346, 347, 348, 349, 350, 351, 352, 353, 354, 355, 356, 357, 358, 359, 360, 361, 362, 363, 364, 365, 366, 367, 368, 369, 370, 371, 372, 373, 374, 375, 376, 377, 378, 379, 380, 381, 382, 383, 384, 385, 386, 387, 388, 389, 390, 391, 392, 393, 394, 395, 396, 397, 398, 399, 400, 401, 402, 403, 404, 405, 406, 407, 408, 409, 410, 411, 412, 413, 414, 415, 416, 417, 418, 419, 420, 421, 422, 423, 424, 425, 426, 427, 428, 429, 430, 431, 432, 433, 434, 435, 436, 437, 438, 439, 440, 441, 442, 443, 444, 445, and 446, or 2497, 2498, 2499, 2500, 2501, 2502, 2503, 2504, 2505, 2506, 2507, 2508, 2509, 2510, 2511, 2512, 2513, 2514, 2515, 2516, 2517, 2518, 2519, 2520, 2521, 2522, 2523, 2524, 2525, 2526, 2527, 2528, 2529, 2530, 2531, 2532, 2533, 2534, 2535, 2536, 2537, 2538, 2539, 2540, 2541, 2542, 2543, 2544, 2545, 2546, 2547, 2548, 2549, 2550, 2551, 2552, 2553, 2554, 2555, 2556, 2557, 2558, 2559, 2560, 2561, 2562, 2563, 2564, 2565, 2566, 2567, 2568, 2569, 2570, 2571, 2572, 2573, 2574, 2575, 2576, 2577, 2578, 2579, 2580, 2581, 2582, 2583, 2584, 2585, 2586, 2587, 2588, 2589, 2590, 2591, 2592, 2593, 2594, 2595, 2596, 2597, 2598, 2599, 2600, 2601, 2602, 2603, 2604, 2605, 2606, 2607, 2608, 2609, 2610, 2611, 2612, 2613, 2614, 2615, 2616, 2617, 2618, 2619, 2620, 2621, 2622, 2623, 2624, 2625, 2626, 2627, 2628, 2629, 2630, 2631, 2632, 2633, 2634, 2635, 2636, 2637, 2638, 2639, 2640, 2641, 2642, 2643, 2644, 2645, 2646, 2647, 2648, 2649, 2650, 2651, 2652, 2653, 2654, 2655, 2656, 2657, 2658, 2659, 2660, 2661, 2662, 2663, 2664, 2665, 2666, 2667, 2668, 2669, 2670, 2671, 2672, 2673, 2674, 2675, 2676, 2677, 2678, 2679, 2680, 2681, 2682, 2683, 2684, 2685, 2686, 2687, 2688, 2689, 2690, 2691, 2692, 2693, 2694, 2695, 2696, 2697, 2698, 2699, 2700, 2701, 2702, 2703, 2704, 2705, 2706, 2707, 2708, 2709, 2710, 2711, 2712, 2713, 2714, 2715, 2716, 2717, 2718, 2719, 2720, 2721, 2722, 2723, 2724, 2725, 2726, 2727, 2728, 2729, 2730, 2731, 2732, 2733, 2734, 2735, 2736, 2737, 2738, 2739, 2740, 2741, 2742, 2743, 2744, 2745, 2746, 2747, 2748, 2749, 2750, 2751, 2752, 2753, 2754, 2755, 2756, 2757, 2758, 2759, 2760, 2761, 2762, 2763, 2764, 2765, 2766, 2767, 2768, 2769, 2770, 2771, 2772, 2773, 2774, 2775, 2776, 2777, 2778, 2779, 2780, 2781, 2782, 2783, 2784, 2785, 2786, 2787, 2788, 2789, 2790, 2791, 2792, 2793, 2794, 2795, 2796, 2797, 2798, 2799, 2800, 2801, 2802, 2803, 2804, 2805, 2806, 2807, 2808, 2809, 2810, 2811, 2812, 2813, 2814, 2815, 2816, 2817, 2818, 2819, 2820, 2821, 2822, 2823, 2824, 2825, 2826, 2827, 2828, 2829, 2830, 2831, 2832, 2833, 2834, 2835, 2836, 2837, 2838, 2839, 2840, 2841, 2842, 2843, 2844, 2845, 2846, 2847, 2848, 2849, 2850, 2851, 2852, 2853, 2854, 2855, 2856, 2857, 2858, 2859, 2860, 2861, 2862, 2863, 2864, 2865, 2866, 2867, 2868, 2869, 2870, 2871, 2872, 2873, 2874, 2875, 2876, 2877, 2878, 2879, 2880, 2881, 2882, 2883, 2884, 2885, 2886, 2887, 2888, 2889, 2890, 2891, 2892, 2893, 2894, 2895, 2896, 2897, 2898, 2899, 2900, 2901, 2902, 2903, 2904, 2905, 2906, 2907, 2908, 2909, 2910, 2911, 2912, 2913, 2914, 2915, 2916, 2917, 2918, 2919, 2920, 2921, 2922, 2923, 2924, 2925, 2926, 2927, 2928, 2929, 2930, 2931, 2932, 2933, 2934, 2935, 2936, 2937, 2938, 2939, 2940, 2941, 2942, 2943, 2944, 2945, 2946, 2947, 2948, 2949, 2950, 2951, 2952, 2953, 2954, 2955, 2956, 2957, 2958, 2959, 2960, 2961, 2962, 2963, 2964, 2965, 2966, 2967, 2968, 2969, 2970, 2971, 2972, 2973, 2974, 2975, 2976, 2977, 2978, 2979, 2980, 2981, 2982, 2983, 2984, 2985, 2986, 2987, 2988, 2989, 2990, 2991, 2992, 2993, 2994, 2995, 2996, 2997, 2998, 2999, 3000, 3001, 3002, 3003, 3004, 3005, 3006, 3007, 3008, 3009, 3010, 3011, 3012, 3013, 3014, 3015, 3016, 3017, 3018, 3019, 3020, 3021, 3022, 3023, 3024, 3025, 3026, 3027, 3028, 3029, 3030, 3031, 3032, 3033, 3034, 3035, 3036, 3037, 3038, 3039, 3040, 3041, 3042, 3043, 3044, 3045, 3046, 3047, 3048, 3049, 3050, 3051, 3052, 3053, 3054, 3055, 3056, 3057, 3058, 3059, 3060, 3061, 3062, 3063, 3064, 3065, 3066, 3067, 3068, 3069, 3070, 3071, 3072, 3073, 3074, 3075, 3076, 3077, 3078, 3079, 3080, 3081, 3082, 3083, 3084, 3085, 3086, 3087, 3088, 3089, 3090, 3091, 3092, 3093, 3094, 3095, 3096, 3097, 3098, 3099, 3100, 3101, 3102, 3103, 3104, 3105, 3106, 3107, 3108, 3109, 3110, 3111, 3112, 3113, 3114, 3115, 3116, 3117, 3118, 3119, 3120, 3121, 3122, 3123, 3124, 3125, 3126, 3127, 3128, 3129, 3130, 3131, 3132, 3133, 3134, 3135, 3136, 3137, 3138, 3139, 3140, 3141, 3142, 3143, 3144, 3145, 3146, 3147, 3148, 3149, 3150, 3151, 3152, 3153, 3154, 3155, 3156, 3157, 3158, 3159, 3160, 3161, 3162, 3163, 3164, 3165, 3166, 3167, 3168, 3169, 3170, 3171, 3172, 3173, 3174, 3175, 3176, 3177, 3178, 3179, 3180, 3181, 3182, 3183, 3184, 3185, 3186, 3187, 3188, 3189, 3190, 3191, 3192, 3193, 3194, 3195, 3196, 3197, 3198, 3199, 3200, 3201, 3202, 3203, 3204, 3205, 3206, 3207, 3208, 3209, 3210, 3211, 3212, 3213, 3214, 3215, 3216, 3217, 3218, 3219, 3220, 3221, 3222, 3223, 3224, 3225, 3226, 3227, 3228, 3229, 3230, 3231, 3232, 3233, 3234, 3235, 3236, 3237, 3238, 3239, 3240, 3241, 3242, 3243, 3244, 3245, 3246, 3247, 3248, 3249, 3250, 3251, 3252, 3253, 3254, 3255, 3256, 3257, 3258, 3259, 3260, 3261, 3262, 3263, 3264, 3265, 3266, 3267, 3268, 3269, 3270, 3271, 3272, 3273, 3274, 3275, 3276, 3277, 3278, 3279, 3280, 3281, 3282, 3283, 3284, 3285, 3286, 3287, 3288, 3289, 3290, 3291, 3292, 3293, 3294, 3295, 3296, 3297, 3298, 3299, 3300, 3301, 3302, 3303, 3304, 3305, 3306, 3307, 3308, 3309, 3310, 3311, 3312, 3313, 3314, 3315, 3316, 3317, 3318, 3319, 3320, 3321, 3322, 3323, 3324, 3325, 3326, 3327, 3328, 3329, 3330, 3331, 3332, 3333, 3334, 3335, 3336, 3337, 3338, 3339, 3340, 3341, 3342, 3343, 3344, 3345, 3346, 3347, 3348, 3349, 3350, 3351, 3352, 3353, 3354, 3355, 3356, 3357, 3358, 3359, 3360, 3361, 3362, 3363, 3364, 3365, 3366, 3367, 3368, 3369, 3370, 3371, 3372, 3373, 3374, 3375, 3376, 3377, 3378, 3379, 3380, 3381, 3382, 3383, 3384, 3385, 3386, 3387, 3388, 3389, 3390, 3391, 3392, 3393, 3394, 3395, 3396, 3397, 3398, 3399, 3400, 3401, 3402, 3403, 3404, 3405, 3406, 3407, 3408, 3409, 3410, 3411, 3412, 3413, 3414, 3415, 3416, 3417, 3418, 3419, 3420, 3421, 3422, 3423, 3424, 3425, 3426, 3427, 3428, 3429, 3430, 3431, 3432, 3433, 3434, 3435, 3436, 3437, 3438, 3439, 3440, 3441, 3442, 3443, 3444, 3445, 3446, 3447, 3448, 3449, 3450, 3451, 3452, 3453, 3454, 3455, 3456, 3457, 3458, 3459, 3460, 3461, 3462, 3463, 3464, 3465, 3466, 3467, 3468, 3469, 3470, 3471, 3472, 3473, 3474, 3475, 3476, 3477, 3478, 3479, 3480, 3481, 3482, 3483, 3484, 3485, 3486, 3487, 3488, 3489, 3490, 3491, 3492, 3493, 3494, 3495, 3496, 3497, 3498, 3499, 3500, 3501, 3502, 3503, 3504, 3505, 3506, 3507, 3508, 3509, 3510, 3511, 3512, 3513, 3514, 3515, 3516, 3517, 3518, 3519, 3520, 3521, 3522, 3523, 3524, 3525, 3526, 3527, 3528, 3529, 3530, 3531, 3532, 3533, 3534, 3535, 3536, 3537, 3538, 3539, 3540, 3541, 3542, 3543, 3544, 3545, 3546, 3547, 3548, 3549, 3550, 3551, 3552, 3553, 3554, 3555, 3556, 3557, 3558, 3559, 3560, 3561, 3562, 3563, 3564, 3565, 3566, 3567, 3568, 3569, 3570, 3571, 3572, 3573, 3574, 3575, 3576, 3577, 3578, 3579, 3580, 3581, 3582, 3583, 3584, 3585, 3586, 3587, 3588, 3589, 3590, 3591, 3592, 3593, 3594, 3595, 3596, 3597, 3598, 3599, 3600, 3601, 3602, 3603, 3604, 3605, 3606, 3607, 3608, 3609, 3610, 3611, 3612, 3613, 3614, 3615, 3616, 3617, 3618, 3619, 3620, 3621, 3622, 3623, 3624, 3625, 3626, 3627, 3628, 3629, 3630, 3631, 3632, 3633, 3634, 3635, 3636, 3637, 3638, 3639, 3640, 3641, 3642, 3643, 3644, 3645, 3646, 3647, 3648, 3649, 3650, 3651, 3652, 3653, 3654, 3655, 3656, 3657, 3658, 3659, 3660, 3661, 3662, 3663, 3664, 3665, 3666, 3667, 3668, 3669, 3670, 3671, 3672, 3673, 3674, 3675, 3676, 3677, 3678, 3679, 3680, 3681, 3682, 3683, 3684, 3685, 3686, 3687, 3688, 3689, 3690, 3691, 3692, 3693, 3694, 3695, 3696, 3697, 3698, 3699, 3700, 3701, 3702, 3703, 3704, 3705, 3706, 3707, 3708, 3709, 3710, 3711, 3712, 3713, 3714, 3715, 3716, 3717, 3718, 3719, 3720, 3721, 3722, 3723, 3724, 3725, 3726, 3727, 3728, 3729, 3730, 3731, 3732, 3733, 3734, 3735, 3736, 3737, 3738, 3739, 3740, 3741, 3742, 3743, 3744, 3745, 3746, 3747, 3748, 3749, 3750, 3751, 3752, 3753, 3754, 3755, 3756, 3757, 3758, 3759, 3760, 3761, 3762, 3763, 3764, 3765, 3766, 3767, 3768, 3769, 3770, 3771, 3772, 3773, 3774, 3775, 3776, 3777, 3778, 3779, 3780, 3781, 3782, 3783, 3784, 3785, 3786, 3787, 3788, 3789, 3790, 3791, 3792, 3793, 3794, 3795, 3796, 3797, 3798, 3799, 3800, 3801, 3802, 3803, 3804, 3805, 3806, 3807, 3808, 3809, 3810, 3811, 3812, 3813, 3814, 3815, 3816, 3817, 3818, 3819, 3820, 3821, 3822, 3823, 3824, 3825, 3826, 3827, 3828, 3829, 3830, 3831, 3832, 3833, 3834, 3835, 3836, 3837, 3838, 3839, 3840, 3841, 3842, 3843, 3844, 3845, 3846, 3847, 3848, 3849, 3850, 3851, 3852, 3853, 3854, 3855, 3856, 3857, 3858, 3859, 3860, 3861, 3862, 3863, 3864, 3865, 3866, 3867, 3868, 3869, 3870, 3871, 3872, 3873, 3874, 3875, 3876, 3877, 3878, 3879, 3880, 3881, 3882, 3883, 3884, 3885, 3886, 3887, 3888, 3889, 3890, 3891, 3892, 3893, 3894, 3895, 3896, 3897, 3898, 3899, 3900, 3901, 3902, 3903, 3904, 3905, 3906, 3907, 3908, 3909, 3910, 3911, 3912, 3913, 3914, 3915, 3916, 3917, 3918, 3919, 3920, 3921, 3922, 3923, 3924, 3925, 3926, 3927, 3928, 3929, 3930, 3931, 3932, 3933, 3934, 3935, 3936, 3937, 3938, 3939, 3940, 3941, 3942, 3943, 3944, 3945, 3946, 3947, 3948, 3949, 3950, 3951, 3952, 3953, 3954, 3955, 3956, 3957, 3958, 3959, 3960, 3961, 3962, 3963, 3964, 3965, 3966, 3967, 3968, 3969, 3970, 3971, 3972, 3973, 3974, 3975, 3976, 3977, 3978, 3979, 3980, 3981, 3982, 3983, 3984, 3985, 3986, 3987, 3988, 3989, 3990, 3991, 3992, 3993, 3994, 3995, 3996, 3997, 3998, 3999, 4000, 4001, 4002, 4003, 4004, 4005, 4006, 4007, 4008, 4009, 4010, 4011, 4012, 4013, 4014, 4015, 4016, 4017, 4018, 4019, 4020, 4021, 4022, 4023, 4024, 4025, 4026, 4027, 4028, 4029, 4030, 4031, 4032, 4033, 4034, 4035, 4036, 4037, 4038, 4039, 4040, 4041, 4042, 4043, 4044, 4045, 4046, 4047, 4048, 4049, 4050, 4051, 4052, 4053, 4054, 4055, 4056, 4057, 4058, 4059, 4060, 4061, 4062, 4063, 4064, 4065, 4066, 4067, 4068, 4069, 4070, 4071, 4072, 4073, 4074, 4075, 4076, 4077, 4078, 4079, 4080, 4081, 4082, 4083, 4084, 4085, 4086, 4087, 4088, 4089, 4090, 4091, 4092, 4093, 4094, 4095, 4096, 4097, 4098, 4099, 4100, 4101, 4102, 4103, 4104, 4105, 4106, 4107, 4108, 4109, 4110, 4111, 4112, 4113, 4114, 4115, 4116, 4117, 4118, 4119, 4120, 4121, 4122, 4123, 4124, 4125, 4126, 4127, 4128, 4129, 4130, 4131, 4132, 4133, 4134, 4135, 4136, 4137, 4138, 4139, 4140, 4141, 4142, 4143, 4144, 4145, 4146, 4147, 4148, 4149, 4150, 4151, 4152, 4153, 4154, 4155, 4156, 4157, 4158, 4159, 4160, 4161, 4162, 4163, 4164, 4165, 4166, 4167, 4168, 4169, 4170, 4171, 4172, 4173, 4174, 4175, 4176, 4177, 4178, 4179, 4180, 4181, 4182, 4183, 4184, 4185, 4186, 4187, 4188, 4189, 4190, 4191, 4192, 4193, 4194, 4195, 4196, 4197, 4198, 4199, 4200, 4201, 4202, 4203, 4204, 4205, 4206, 4207, 4208, 4209, 4210, 4211, 4212, 4213, 4214, 4215, 4216, 4217, 4218, 4219, 4220, 4221, 4222, 4223, 4224, 4225, 4226, 4227, 4228, 4229, 4230, 4231, 4232, 4233, 4234, 4235, 4236, 4237, 4238, 4239, 4240, 4241, 4242, 4243, 4244, 4245, 4246, 4247, 4248, 4249, 4250, 4251, 4252, 4253, 4254, 4255, 4256, 4257, 4258, 4259, 4260, 4261, 4262, 4263, 4264, 4265, 4266, 4267, 4268, 4269, 4270, 4271, 4272, 4273, 4274, 4275, 4276, 4277, 4278, 4279, 4280, 4281, 4282, 4283, 4284, 4285, 4286, 4287, 4288, 4289, 4290, 4291, 4292, 4293, 4294, 4295, 4296, 4297, 4298, 4299, 4300, 4301, 4302, 4303, 4304, 4305, 4306, 4307, 4308, 4309, 4310, 4311, 4312, 4313, 4314, 4315, 4316, 4317, 4318, 4319, 4320, 4321, 4322, 4323, 4324, 4325, 4326, 4327, 4328, 4329, 4330, 4331, 4332, 4333, 4334, 4335, 4336, 4337, 4338, 4339, 4340, 4341, 4342, 4343, 4344, 4345, 4346, 4347, 4348, 4349, 4350, 4351, 4352, 4353, 4354, 4355, 4356, 4357, 4358, 4359, 4360, 4361, 4362, 4363, 4364, 4365, 4366, 4367, 4368, 4369, 4370, 4371, 4372, 4373, 4374, 4375, 4376, 4377, 4378, 4379, 4380, 4381, 4382, 4383, 4384, 4385, 4386, 4387, 4388, 4389, 4390, 4391, 4392, 4393, 4394, 4395, 4396, 4397, 4398, 4399, 4400, 4401, 4402, 4403, 4404, 4405, 4406, 4407, 4408, 4409, 4410, 4411, 4412, 4413, 4414, 4415, 4416, 4417, 4418, 4419, 4420, 4421, 4422, 4423, 4424, 4425, 4426, 4427, 4428, 4429, 4430, 4431, 4432, 4433, 4434, 4435, 4436, 4437, 4438, 4439, 4440, 4441, 4442, 4443, 4444, 4445, 4446, 4447, 4448, 4449, 4450, 4451, 4452, 4453, 4454, 4455, 4456, 4457, 4458, 4459, 4460, 4461, 4462, 4463, 4464, 4465, 4466, 4467, 4468, 4469, 4470, 4471, 4472, 4473, 4474, 4475, 4476, 4477, 4478, 4479, 4480, 4481, 4482, 4483, 4484, 4485, 4486, 4487, 4488, 4489, 4490, 4491, 4492, 4493, 4494, 4495, 4496, 4497, 4498, 4499, 4500, 4501, or 4502.

[0092] The spacer sequence can comprise nucleotide 1 through nucleotide 16 of any one of SEQ ID NOs: 229-446 or 2497-4502. The spacer sequence can comprise nucleotide 1 through nucleotide 17 of any one of SEQ ID NOs: 229-446 or 2497-4502. The spacer sequence can comprise nucleotide 1 through nucleotide 18 of any one of SEQ ID NOs: 229-446 or 2497-4502. The spacer sequence can comprise nucleotide 1 through nucleotide 19 of any one of SEQ ID NOs: 229-446 or 2497-4502. The spacer sequence can comprise nucleotide 1 through nucleotide 20 of any one of SEQ ID NOs: 229-446 or 2497-4502. The spacer sequence can comprise nucleotide 1 through nucleotide 21 of any one of SEQ ID NOs: 229-446 or 2497-4502. The spacer sequence can comprise nucleotide 1 through nucleotide 22 of any one of SEQ ID NOs: 229-446 or 2497-4502. The spacer sequence can comprise nucleotide 1 through nucleotide 23 of any one of SEQ ID NOs: 229-446 or 2497-4502. The spacer sequence can comprise nucleotide 1 through nucleotide 24 of any one of SEQ ID NOs: 229-446 or 2497-4502. The spacer sequence can comprise nucleotide 1 through nucleotide 25 of any one of SEQ ID NOs: 229-446 or 2497-4502. The spacer sequence can comprise nucleotide 1 through nucleotide 26 of any one of SEQ ID NOs: 229-446 or 2497-4502. The spacer sequence can comprise nucleotide 1 through nucleotide 27 of any one of SEQ ID NOs: 229-446 or 2497-4502. The spacer sequence can comprise nucleotide 1 through nucleotide 28 of any one of SEQ ID NOs: 229-446 or 2497-4502. The spacer sequence can comprise nucleotide 1 through nucleotide 29 of any one of SEQ ID NOs: 229-446 or 2497-4502. The spacer sequence can comprise nucleotide 1 through nucleotide 30 of any one of SEQ ID NOs: 229-446 or 2497-4502.

[0093] In some embodiments, the spacer sequence has at least 90% identity (e.g., at least 90%, 91%, 92%, 93%, 94%, 95%, 96%, 97%, 98% or 99% identity) to a sequence of Table 5A or 5B or a portion of a sequence of Table 5A or 5B. The spacer sequence can have at least 90% identity to a sequence comprising nucleotide 1 through nucleotide 16 of any one of SEQ ID NOs: 229-446 or 2497-4502. The spacer sequence can have at least 90% identity to a sequence comprising nucleotide 1 through nucleotide 17 of any one of SEQ ID NOs: 229-446 or 2497-4502. The spacer sequence can have at least 90% identity to a sequence comprising nucleotide 1 through nucleotide 18 of any one of SEQ ID NOs: 229-446 or 2497-4502. The spacer sequence can have at least 90% identity to a sequence comprising nucleotide 1 through nucleotide 19 of any one of SEQ ID NOs: 229-446 or 2497-4502. The spacer sequence can have at least 90% identity to a sequence comprising nucleotide 1 through nucleotide 20 of any one of SEQ ID NOs: 229-446 or 2497-4502. The spacer sequence can have at least 90% identity to a sequence comprising nucleotide 1 through nucleotide 21 of any one of SEQ ID NOs: 229-446 or 2497-4502. The spacer sequence can have at least 90% identity to a sequence comprising nucleotide 1 through nucleotide 22 of any one of SEQ ID NOs: 229-446 or 2497-4502. The spacer sequence can have at least 90% identity to a sequence comprising nucleotide 1 through nucleotide 23 of any one of SEQ ID NOs: 229-446 or 2497-4502. The spacer sequence can have at least 90% identity to a sequence comprising nucleotide 1 through nucleotide 24 of any one of SEQ ID NOs: 229-446 or 2497-4502. The spacer sequence can have at least 90% identity to a sequence comprising nucleotide 1 through nucleotide 25 of any one of SEQ ID NOs: 229-446 or 2497-4502. The spacer sequence can have at least 90% identity to a sequence comprising nucleotide 1 through nucleotide 26 of any one of SEQ ID NOs: 229-446 or 2497-4502. The spacer sequence can have at least 90% identity to a sequence comprising nucleotide 1 through nucleotide 27 of any one of SEQ ID NOs: 229-446 or 2497-4502. The spacer sequence can have at least 90% identity to a sequence comprising nucleotide 1 through nucleotide 28 of any one of SEQ ID NOs: 229-446 or 2497-4502. The spacer sequence can have at least 90% identity to a sequence comprising nucleotide 1 through nucleotide 29 of any one of SEQ ID NOs: 229-446 or 2497-4502. The spacer sequence can have at least 90% identity to a sequence comprising nucleotide 1 through nucleotide 30 of any one of SEQ ID NOs: 229-446 or 2497-4502.

TABLE 5A
Target and Spacer Sequences − Exons

| ref_id | Strand | PAM | | target | | spacer |
|---|---|---|---|---|---|---|
| STMN2_ | + | TT | 11 | CCTTCGCCACTGCTCAGC | 229 | CCUUCGCCACUGCUCAGC |
| exon1 | | TG | | GTCTGCACATCC | | GUCUGCACAUCC |
| STMN2_ | + | CT | 12 | GCCACTGCTCAGCGTCTG | 230 | GCCACUGCUCAGCGUCU |
| exon1 | | TC | | CACATCCCTACA | | GCACAUCCCUACA |
| STMN2_ | + | CT | 13 | GCCTTCGCCACTGCTCAG | 231 | GCCUUCGCCACUGCUCAG |
| exon1 | | TT | | CGTCTGCACATC | | CGUCUGCACAUC |
| STMN2_ | − | CT | 14 | CCCATTGCTGTTTTAGCC | 232 | CCCAUUGCUGUUUUAGCC |
| exon1 | | TA | | ATTGTAGGGATG | | AUUGUAGGGAUG |
| STMN2_ | − | AT | 15 | CTGTTTTAGCCATTGTAG | 233 | CUGUUUUAGCCAUUGUAG |
| exon1 | | TG | | GGATGTGCAGAC | | GGAUGUGCAGAC |
| STMN2_ | − | GT | 16 | TAGCCATTGTAGGGATGT | 234 | UAGCCAUUGUAGGGAUGU |
| exon1 | | TT | | GCAGACGCTGAG | | GCAGACGCUGAG |
| STMN2_ | − | TT | 17 | AGCCATTGTAGGGATGTG | 235 | AGCCAUUGUAGGGAUGU |
| exon1 | | TT | | CAGACGCTGAGC | | GCAGACGCUGAGC |
| STMN2_ | − | TT | 18 | GCCATTGTAGGGATGTGC | 236 | GCCAUUGUAGGGAUGUG |
| exon1 | | TA | | AGACGCTGAGCA | | CAGACGCUGAGCA |
| STMN2_ | − | AT | 19 | TAGGGATGTGCAGACGCT | 237 | UAGGGAUGUGCAGACGC |
| exon1 | | TG | | GAGCAGTGGCGA | | UGAGCAGUGGCGA |
| STMN2_ | + | GT | 20 | TCCGTCGGCTCTACCTGG | 238 | UCCGUCGGCUCUACCUG |
| exon1 | | TC | | AGCCCACCTCT | | GAGCCCACCUCU |
| STMN2_ | − | TT | 21 | GTTTTCTAAGCCAGGGAG | 239 | GUUUUCUAAGCCAGGGAG |
| exon2 | | TG | | GTTTTGAAAGAT | | GUUUUGAAAGAU |
| STMN2_ | + | CT | 22 | CAAAACCTCCCTGGCTTA | 240 | CAAAACCUCCCUGGCUUA |
| exon2 | | TT | | GAAAACCAAATT | | GAAAACCAAAUU |
| STMN2_ | + | TT | 23 | AAAACCTCCCTGGCTTAG | 241 | AAAACCUCCCUGGCUUAG |
| exon2 | | TC | | AAAACCAAATTT | | AAAACCAAAUUU |
| STMN2_ | + | CT | 24 | GAAAACCAAATTTTTGTAG | 242 | GAAAACCAAAUUUUUGUA |
| exon2 | | TA | | AGAGAGATGGG | | GAGAGAGAUGGG |
| STMN2_ | − | AT | 25 | GGTTTTCTAAGCCAGGGA | 243 | GGUUUUCUAAGCCAGGGA |
| exon2 | | TT | | GGTTTTGAAAGA | | GGUUUUGAAAGA |
| STMN2_ | + | TT | 26 | TGTAGAGAGAGATGGGTA | 244 | UGUAGAGAGAGAUGGGUA |
| exon2 | | TT | | GAATCTAATTTT | | GAAUCUAAUUUU |
| STMN2_ | + | AT | 27 | TTGTAGAGAGAGATGGGT | 245 | UUGUAGAGAGAGAUGGG |
| exon2 | | TT | | AGAATCTAATTT | | UAGAAUCUAAUUU |
| STMN2_ | − | AT | 28 | GATTCTACCCATCTCTCTC | 246 | GAUUCUACCCAUCUCUCU |
| exon2 | | TA | | TACAAAAATTT | | CUACAAAAAUUU |
| STMN2_ | − | AT | 29 | TACCCATCTCTCTCTACAA | 247 | UACCCAUCUCUCUCUACA |
| exon2 | | TC | | AAATTTGGTTT | | AAAAUUUGGUUU |
| STMN2_ | − | TT | 30 | GAATAAAATTAGATTCTAC | 248 | GAAUAAAAUUAGAUUCUA |
| exon2 | | TA | | CCATCTCTCTC | | CCCAUCUCUCUC |
| STMN2_ | − | CT | 31 | AGAATAAAATTAGATTCTA | 249 | AGAAUAAAAUUAGAUUCU |
| exon2 | | TT | | CCCATCTCTCT | | ACCCAUCUCUCU |
| STMN2_ | − | AT | 32 | CTTTAGAATAAAATTAGAT | 250 | CUUUAGAAUAAAAUUAGA |
| exon2 | | TG | | TCTACCCATCT | | UUCUACCCAUCU |
| STMN2_ | + | AT | 33 | TAAAGCAATTAGCATTACA | 251 | UAAAGCAAUUAGCAUUAC |
| exon2 | | TC | | TCATCACAGCA | | AUCAUCACAGCA |
| STMN2_ | + | TT | 34 | TTCTAAAGCAATTAGCATT | 252 | UUCUAAAGCAAUUAGCAU |
| exon2 | | TA | | ACATCATCACA | | UACAUCAUCACA |
| STMN2_ | + | AT | 35 | TATTCTAAAGCAATTAGCA | 253 | UAUUCUAAAGCAAUUAGC |
| exon2 | | TT | | TTACATCATCA | | AUUACAUCAUCA |
| STMN2_ | + | TT | 36 | ATTCTAAAGCAATTAGCAT | 254 | AUUCUAAAGCAAUUAGCA |
| exon2 | | TT | | TACATCATCAC | | UUACAUCAUCAC |
| STMN2_ | + | TT | 37 | GTAGAGAGAGATGGGTAG | 255 | GUAGAGAGAGAUGGGUA |
| exon2 | | TT | | AATCTAATTTTA | | GAAUCUAAUUUUA |
| STMN2_ | + | TT | 38 | TAGAGAGAGATGGGTAGA | 256 | UAGAGAGAGAUGGGUAGA |
| exon2 | | TG | | ATCTAATTTTAT | | AUCUAAUUUUAU |
| STMN2_ | + | AT | 39 | GCATTACATCATCACAGC | 257 | GCAUUACAUCAUCACAGC |
| exon2 | | TA | | AG | | AG |
| STMN2_ | − | GT | 40 | TCTAAGCCAGGGAGGTTT | 258 | UCUAAGCCAGGGAGGUUU |
| exon2 | | TT | | TGAAAGATT | | UGAAAGAUU |
| STMN2_ | − | TT | 41 | CTAAGCCAGGGAGGTTTT | 259 | CUAAGCCAGGGAGGUUUU |
| exon2 | | TT | | GAAAGATT | | GAAAGAUU |
| STMN2_ | − | TT | 42 | TAAGCCAGGGAGGTTTTG | 260 | UAAGCCAGGGAGGUUUU |
| exon2 | | TC | | AAAGATT | | GAAAGAUU |
| STMN2_ | − | GT | 43 | CGAGGTTCCGGGTAAAAG | 261 | CGAGGUUCCGGGUAAAAG |
| exon3 | | TG | | CAAGAGCAGATC | | CAAGAGCAGAUC |
| STMN2_ | − | CT | 44 | TAGGCTGAAATGAAAAGC | 262 | UAGGCUGAAAUGAAAAGC |
| exon3 | | TG | | TGAAGATTAGTA | | UGAAGAUUAGUA |
| STMN2_ | − | GT | 45 | CGGGTAAAAGCAAGAGCA | 263 | CGGGUAAAAGCAAGAGCA |
| exon3 | | TC | | GATCAGTGACAG | | GAUCAGUGACAG |
| STMN2_ | − | TT | 46 | CCTTGTAGGCTGAAATGA | 264 | CCUUGUAGGCUGAAAUGA |
| exon3 | | TT | | AAAGCTGAAGAT | | AAAGCUGAAGAU |
| STMN2_ | − | TT | 47 | TCCTTGTAGGCTGAAATG | 265 | UCCUUGUAGGCUGAAAUG |
| exon3 | | TT | | AAAAGCTGAAGA | | AAAAGCUGAAGA |
| STMN2_ | − | TT | 48 | TTCCTTGTAGGCTGAAAT | 266 | UUCCUUGUAGGCUGAAAU |
| exon3 | | TT | | GAAAAGCTGAAG | | GAAAAGCUGAAG |
| STMN2_ | − | AT | 49 | TTTCCTTGTAGGCTGAAAT | 267 | UUUCCUUGUAGGCUGAAA |
| exon3 | | TT | | GAAAAGCTGAA | | UGAAAAGCUGAA |
| STMN2_ | − | CT | 50 | ATTTTTTCCTTGTAGGCTG | 268 | AUUUUUUCCUUGUAGGCU |
| exon3 | | TC | | AAATGAAAAGC | | GAAAUGAAAAGC |
| STMN2_ | + | AT | 51 | AGAAAAAATGAAATATACT | 269 | AGAAAAAAUGAAAUAUAC |
| exon3 | | TC | | AATCTTCAGCT | | UAAUCUUCAGCU |
| STMN2_ | + | CT | 52 | AGCTTTTCATTTCAGCCTA | 270 | AGCUUUUCAUUUCAGCCU |
| exon3 | | TC | | CAAGGAAAAAA | | ACAAGGAAAAAA |
| STMN2_ | + | CT | 53 | TCATTTCAGCCTACAAGG | 271 | UCAUUUCAGCCUACAAGG |
| exon3 | | TT | | AAAAAATGAAGG | | AAAAAAUGAAGG |
| STMN2_ | − | TT | 54 | CTTGTAGGCTGAAATGAA | 272 | CUUGUAGGCUGAAAUGAA |
| exon3 | | TC | | AAGCTGAAGATT | | AAGCUGAAGAUU |
| STMN2_ | + | TT | 55 | ATTTCAGCCTACAAGGAA | 273 | AUUUCAGCCUACAAGGAA |
| exon3 | | TC | | AAAATGAAGGAG | | AAAAUGAAGGAG |
| STMN2_ | + | TT | 56 | CATTTCAGCCTACAAGGA | 274 | CAUUUCAGCCUACAAGGA |
| exon3 | | TT | | AAAAATGAAGGA | | AAAAAUGAAGGA |
| STMN2_ | − | GT | 57 | CTCACCATCGTAAGTATA | 275 | CUCACCAUCGUAAGUAUA |
| exon3 | | TA | | GATGTTGATGTT | | GAUGUUGAUGUU |
| STMN2_ | − | TT | 58 | CAAATGATCTAGCTAGCA | 276 | CAAAUGAUCUAGCUAGCA |
| exon3 | | TC | | GGGGTATGTCTA | | GGGGUAUGUCUA |
| STMN2_ | − | CT | 59 | CCAAATGATCTAGCTAGC | 277 | CCAAAUGAUCUAGCUAGC |
| exon3 | | TT | | AGGGGTATGTCT | | AGGGGUAUGUCU |
| STMN2_ | + | CT | 60 | CGATGGTGAGTAACCTAG | 278 | CGAUGGUGAGUAACCUAG |
| exon3 | | TA | | GATAGACATACC | | GAUAGACAUACC |
| STMN2_ | + | TT | 61 | CCCGGAACCTCGCAACAT | 279 | CCCGGAACCUCGCAACAU |
| exon3 | | TA | | CAACATCTATAC | | CAACAUCUAUAC |
| STMN2_ | − | GT | 62 | ATGTTGCGAGGTTCCGGG | 280 | AUGUUGCGAGGUUCCGG |
| exon3 | | TG | | TAAAAGCAAGAG | | GUAAAAGCAAGAG |
| STMN2_ | + | CT | 63 | TACCCGGAACCTCGCAAC | 281 | UACCCGGAACCUCGCAAC |
| exon3 | | TT | | ATCAACATCTAT | | AUCAACAUCUAU |
| STMN2_ | + | CT | 64 | CTTTTACCCGGAACCTCG | 282 | CUUUUACCCGGAACCUCG |
| exon3 | | TG | | CAACATCAACAT | | CAACAUCAACAU |
| STMN2_ | + | TT | 65 | AGCCTACAAGGAAAAAAT | 283 | AGCCUACAAGGAAAAAAU |
| exon3 | | TC | | GAAGGAGCTGTC | | GAAGGAGCUGUC |
| STMN2_ | + | AT | 66 | CAGCCTACAAGGAAAAAA | 284 | CAGCCUACAAGGAAAAAA |
| exon3 | | TT | | TGAAGGAGCTGT | | UGAAGGAGCUGU |
| STMN2_ | + | TT | 67 | ACCCGGAACCTCGCAACA | 285 | ACCCGGAACCUCGCAACA |
| exon3 | | TT | | TCAACATCTATA | | UCAACAUCUAUA |
| STMN2_ | − | AT | 68 | GTATATTTCATTTTTTCTG | 286 | GUAUAUUUCAUUUUUUCU |
| exon3 | | TA | | AATTTCTC | | GAAUUUCUC |
| STMN2_ | − | TT | 69 | TTCTGGATCTCCTCCAGG | 287 | UUCUGGAUCUCCUCCAGG |
| exon4 | | TC | | GACAGGTCTTTC | | GACAGGUCUUUC |
| STMN2_ | − | CT | 70 | TGGATCTCCTCCAGGGAC | 288 | UGGAUCUCCUCCAGGGAC |
| exon4 | | TC | | AGGTCTTTCTTC | | AGGUCUUUCUUC |
| STMN2_ | − | CT | 71 | CTTCTTTGGAGAAGCTAA | 289 | CUUCUUUGGAGAAGCUAA |
| exon4 | | TT | | AGTTCGTGGGGC | | AGUUCGUGGGGC |
| STMN2_ | − | TT | 72 | TTCTTTGGAGAAGCTAAA | 290 | UUCUUUGGAGAAGCUAAA |
| exon4 | | TC | | GTTCGTGGGGCT | | GUUCGUGGGGCU |
| STMN2_ | − | CT | 73 | TTTGGAGAAGCTAAAGTT | 291 | UUUGGAGAAGCUAAAGUU |
| exon4 | | TC | | CGTGGGGCTTCT | | CGUGGGGCUUCU |
| STMN2_ | − | CT | 74 | GGAGAAGCTAAAGTTCGT | 292 | GGAGAAGCUAAAGUUCGU |
| exon4 | | TT | | GGGGCTTCTGAG | | GGGGCUUCUGAG |
| STMN2_ | − | TT | 75 | GAGAAGCTAAAGTTCGTG | 293 | GAGAAGCUAAAGUUCGUG |
| exon4 | | TG | | GGGCTTCTGAGA | | GGGCUUCUGAGA |
| STMN2_ | − | GT | 76 | GTGGGGCTTCTGAGATAG | 294 | GUGGGGCUUCUGAGAUA |
| exon4 | | TC | | GAGATGGTGGCT | | GGAGAUGGUGGCU |
| STMN2_ | − | CT | 77 | TGAGATAGGAGATGGTGG | 295 | UGAGAUAGGAGAUGGUG |
| exon4 | | TC | | CTTCAAGATCAG | | GCUUCAAGAUCAG |
| STMN2_ | − | TT | 78 | TTGATTTGCTTCACTTCCA | 296 | UUGAUUUGCUUCACUUCC |
| exon4 | | TG | | TATCTGAAAAG | | AUAUCUGAAAAG |
| STMN2_ | − | GT | 79 | GTTGATTTGCTTCACTTCC | 297 | GUUGAUUUGCUUCACUUC |
| exon4 | | TT | | ATATCTGAAAA | | CAUAUCUGAAAA |
| STMN2_ | − | GT | 80 | ATTTGCTTCACTTCCATAT | 298 | AUUUGCUUCACUUCCAUA |
| exon4 | | TG | | CTGAAAAGTGA | | UCUGAAAAGUGA |
| STMN2_ | − | AT | 81 | GCTTCACTTCCATATCTGA | 299 | GCUUCACUUCCAUAUCUG |
| exon4 | | TT | | AAAGTGAACAT | | AAAAGUGAACAU |
| STMN2_ | − | TT | 82 | CTTCACTTCCATATCTGAA | 300 | CUUCACUUCCAUAUCUGA |
| exon4 | | TG | | AAGTGAACATT | | AAAGUGAACAUU |
| STMN2_ | − | CT | 83 | ACTTCCATATCTGAAAAGT | 301 | ACUUCCAUAUCUGAAAAG |
| exon4 | | TC | | GAACATTTGAG | | UGAACAUUUGAG |
| STMN2_ | − | CT | 84 | CATATCTGAAAAGTGAAC | 302 | CAUAUCUGAAAAGUGAAC |
| exon4 | | TC | | ATTTGAGAATGT | | AUUUGAGAAUGU |
| STMN2_ | − | AT | 85 | GAGAATGTTAAGCATACA | 303 | GAGAAUGUUAAGCAUACA |
| exon4 | | TT | | AAGCTTGCAGCA | | AAGCUUGCAGCA |
| STMN2_ | − | TT | 86 | AGAATGTTAAGCATACAAA | 304 | AGAAUGUUAAGCAUACAA |
| exon4 | | TG | | GCTTGCAGCAT | | AGCUUGCAGCAU |
| STMN2_ | − | GT | 87 | CTTCTGGATCTCCTCCAG | 305 | CUUCUGGAUCUCCUCCAG |
| exon4 | | TT | | GGACAGGTCTTT | | GGACAGGUCUUU |
| STMN2_ | − | CT | 88 | AAGATCAGCTCAAAAGCC | 306 | AAGAUCAGCUCAAAAGCC |
| exon4 | | TC | | TGGCCAGAGGCA | | UGGCCAGAGGCA |
| STMN2_ | − | TT | 89 | CTCTGCAGCCTCCAGTTT | 307 | CUCUGCAGCCUCCAGUUU |
| exon4 | | TC | | CTTCTGGATCTC | | CUUCUGGAUCUC |
| STMN2_ | + | TT | 90 | AGATATGGAAGTGAAGCA | 308 | AGAUAUGGAAGUGAAGCA |
| exon4 | | TC | | AATCAACAAACG | | AAUCAACAAACG |
| STMN2_ | − | CT | 91 | TTTCCTCTGCAGCCTCCA | 309 | UUUCCUCUGCAGCCUCCA |
| exon4 | | TC | | GTTTCTTCTGGA | | GUUUCUUCUGGA |
| STMN2_ | + | TT | 92 | TATGCTTAACATTCTCAAA | 310 | UAUGCUUAACAUUCUCAA |
| exon4 | | TG | | TGTTCACTTTT | | AUGUUCACUUUU |
| STMN2_ | + | CT | 93 | ACATTCTCAAATGTTCACT | 311 | ACAUUCUCAAAUGUUCAC |
| exon4 | | TA | | TTTCAGATATG | | UUUUCAGAUAUG |
| STMN2_ | + | AT | 94 | TCAAATGTTCACTTTTCAG | 312 | UCAAAUGUUCACUUUUCA |
| exon4 | | TC | | ATATGGAAGTG | | GAUAUGGAAGUG |
| STMN2_ | + | GT | 95 | ACTTTTCAGATATGGAAGT | 313 | ACUUUUCAGAUAUGGAAG |
| exon4 | | TC | | GAAGCAAATCA | | UGAAGCAAAUCA |
| STMN2_ | + | CT | 96 | TCAGATATGGAAGTGAAG | 314 | UCAGAUAUGGAAGUGAAG |
| exon4 | | TT | | CAAATCAACAAA | | CAAAUCAACAAA |
| STMN2_ | + | TT | 97 | CAGATATGGAAGTGAAGC | 315 | CAGAUAUGGAAGUGAAGC |
| exon4 | | TT | | AAATCAACAAAC | | AAAUCAACAAAC |
| STMN2_ | + | CT | 98 | TGAGCTGATCTTGAAGCC | 316 | UGAGCUGAUCUUGAAGCC |
| exon4 | | TT | | ACCATCTCCTAT | | ACCAUCUCCUAU |
| STMN2_ | + | TT | 99 | GAGCTGATCTTGAAGCCA | 317 | GAGCUGAUCUUGAAGCCA |
| exon4 | | TT | | CCATCTCCTATC | | CCAUCUCCUAUC |
| STMN2_ | + | TT | 100 | AGCTGATCTTGAAGCCAC | 318 | AGCUGAUCUUGAAGCCAC |
| exon4 | | TG | | CATCTCCTATCT | | CAUCUCCUAUCU |
| STMN2_ | + | CT | 101 | AAGCCACCATCTCCTATC | 319 | AAGCCACCAUCUCCUAUC |
| exon4 | | TG | | TCAGAAGCCCCA | | UCAGAAGCCCCA |
| STMN2_ | + | CT | 102 | AGCTTCTCCAAAGAAGAA | 320 | AGCUUCUCCAAAGAAGAA |
| exon4 | | TT | | AGACCTGTCCCT | | AGACCUGUCCCU |
| STMN2_ | + | TT | 103 | GCTTCTCCAAAGAAGAAA | 321 | GCUUCUCCAAAGAAGAAA |
| exon4 | | TA | | GACCTGTCCCTG | | GACCUGUCCCUG |
| STMN2_ | + | CT | 104 | TCCAAAGAAGAAAGACCT | 322 | UCCAAAGAAGAAAGACCU |
| exon4 | | TC | | GTCCCTGGAGGA | | GUCCCUGGAGGA |
| STMN2_ | + | CT | 105 | TTCCATAGGTTTTCCTTCT | 323 | UUCCAUAGGUUUUCCUUC |
| exon4 | | TT | | CTCTCTCCCTC | | UCUCUCUCCCUC |
| STMN2_ | + | TT | 106 | TCCATAGGTTTTCCTTCTC | 324 | UCCAUAGGUUUUCCUUCU |
| exon4 | | TT | | TCTCTCCCTCC | | CUCUCUCCCUCC |
| STMN2_ | + | TT | 107 | CCATAGGTTTTCCTTCTCT | 325 | CCAUAGGUUUUCCUUCUC |
| exon4 | | TT | | CTCTCCCTCCC | | UCUCUCCCUCCC |
| STMN2_ | + | TT | 108 | CATAGGTTTTCCTTCTCTC | 326 | CAUAGGUUUUCCUUCUCU |
| exon4 | | TC | | TCTCCCTCCCC | | CUCUCCCUCCCC |
| STMN2_ | + | GT | 109 | TCCTTCTCTCTCTCCCTCC | 327 | UCCUUCUCUCUCUCCCUC |
| exon4 | | TT | | CCTGCTCCTCC | | CCCUGCUCCUCC |
| STMN2_ | − | GT | 110 | CCTTTCTTCTTTCCTCTGC | 328 | CCUUUCUUCUUUCCUCUG |
| exon4 | | TA | | AGCCTCCAGTT | | CAGCCUCCAGUU |
| STMN2_ | − | CT | 111 | CTTCTTTCCTCTGCAGCCT | 329 | CUUCUUUCCUCUGCAGCC |
| exon4 | | TT | | CCAGTTTCTTC | | UCCAGUUUCUUC |
| STMN2_ | − | TT | 112 | TTCTTTCCTCTGCAGCCTC | 330 | UUCUUUCCUCUGCAGCCU |
| exon4 | | TC | | CAGTTTCTTCT | | CCAGUUUCUUCU |
| STMN2_ | − | CT | 113 | CCTCTGCAGCCTCCAGTT | 331 | CCUCUGCAGCCUCCAGUU |
| exon4 | | TT | | TCTTCTGGATCT | | UCUUCUGGAUCU |
| STMN2_ | + | CT | 114 | GTATGCTTAACATTCTCAA | 332 | GUAUGCUUAACAUUCUCA |
| exon4 | | TT | | ATGTTCACTTT | | AAUGUUCACUUU |
| STMN2_ | + | TT | 115 | CCTTCTCTCTCTCCCTCC | 333 | CCUUCUCUCUCUCCCUCC |
| exon4 | | TT | | CCTGCTCCTCC | | CCUGCUCCUCC |
| STMN2_ | + | TT | 116 | CTTCTCTCTCTCCCTCCC | 334 | CUUCUCUCUCUCCCUCCC |
| exon4 | | TC | | CTGCTCCTCC | | CUGCUCCUCC |
| STMN2_ | + | CT | 117 | TCTCTCTCCCTCCCCTGC | 335 | UCUCUCUCCCUCCCCUGC |
| exon4 | | TC | | TCCTCC | | UCCUCC |
| STMN2_ | − | GT | 118 | AGCATACAAAGCTTGCAG | 336 | AGCAUACAAAGCUUGCAG |
| exon4 | | TA | | CATGG | | CAUGG |
| STMN2_ | + | GT | 119 | GTGTTTGGATAATTATAAG | 337 | GUGUUUGGAUAAUUAUAA |
| exon5 | | TT | | ATGGCTATGTT | | GAUGGCUAUGUU |
| STMN2_ | − | TT | 120 | CTGCAGACGTTCAATAAT | 338 | CUGCAGACGUUCAAUAAU |
| exon5 | | TC | | AGCAGCTAGATT | | AGCAGCUAGAUU |
| STMN2_ | − | TT | 121 | AGGATCAGCTTTTCCTCC | 339 | AGGAUCAGCUUUUCCUCC |
| exon5 | | TC | | GCCATCTTGCTG | | GCCAUCUUGCUG |
| STMN2_ | − | CT | 122 | TCCTCCGCCATCTTGCTG | 340 | UCCUCCGCCAUCUUGCUG |
| exon5 | | TT | | AAGTTGTTGTTC | | AAGUUGUUGUUC |
| STMN2_ | − | TT | 123 | CCTCCGCCATCTTGCTGA | 341 | CCUCCGCCAUCUUGCUGA |
| exon5 | | TT | | AGTTGTTGTTCT | | AGUUGUUGUUCU |
| STMN2_ | − | TT | 124 | CTCCGCCATCTTGCTGAA | 342 | CUCCGCCAUCUUGCUGAA |
| exon5 | | TC | | GTTGTTGTTCTC | | GUUGUUGUUCUC |
| STMN2_ | − | CT | 125 | CTGAAGTTGTTGTTCTCCT | 343 | CUGAAGUUGUUGUUCUCC |
| exon5 | | TG | | CCAAAGCCTTC | | UCCAAAGCCUUC |
| STMN2_ | − | GT | 126 | TTGTTCTCCTCCAAAGCCT | 344 | UUGUUCUCCUCCAAAGCC |
| exon5 | | TG | | TCTGAAGGACT | | UUCUGAAGGACU |
| STMN2_ | − | GT | 127 | TTCTCCTCCAAAGCCTTCT | 345 | UUCUCCUCCAAAGCCUUC |
| exon5 | | TG | | GAAGGACTTCT | | UGAAGGACUUCU |
| STMN2_ | − | GT | 128 | TCCTCCAAAGCCTTCTGA | 346 | UCCUCCAAAGCCUUCUGA |
| exon5 | | TC | | AGGACTTCTCGC | | AGGACUUCUCGC |
| STMN2_ | − | CT | 129 | TGAAGGACTTCTCGCTCG | 347 | UGAAGGACUUCUCGCUCG |
| exon5 | | TC | | TGTTCCCTCTTC | | UGUUCCCUCUUC |
| STMN2_ | − | TT | 130 | CAGGATCAGCTTTTCCTC | 348 | CAGGAUCAGCUUUUCCUC |
| exon5 | | TT | | CGCCATCTTGCT | | CGCCAUCUUGCU |
| STMN2_ | − | CT | 131 | TCGCTCGTGTTCCCTCTT | 349 | UCGCUCGUGUUCCCUCU |
| exon5 | | TC | | CTCTGCCAATTG | | UCUCUGCCAAUUG |
| STMN2_ | − | CT | 132 | TCTGCCAATTGTTTCAGCA | 350 | UCUGCCAAUUGUUUCAGC |
| exon5 | | TC | | CCTGGGCCTCC | | ACCUGGGCCUCC |
| STMN2_ | − | AT | 133 | TTTCAGCACCTGGGCCTC | 351 | UUUCAGCACCUGGGCCUC |
| exon5 | | TG | | CTGAGACTGGGG | | CUGAGACUGGGG |
| STMN2_ | − | GT | 134 | CAGCACCTGGGCCTCCTG | 352 | CAGCACCUGGGCCUCCU |
| exon5 | | TT | | AGACTGGGGAAG | | GAGACUGGGGAAG |
| STMN2_ | − | TT | 135 | AGCACCTGGGCCTCCTGA | 353 | AGCACCUGGGCCUCCUGA |
| exon5 | | TC | | GACTGGGGAAGA | | GACUGGGGAAGA |
| STMN2_ | − | GT | 136 | AATAATAGCAGCTAGATTA | 354 | AAUAAUAGCAGCUAGAUU |
| exon5 | | TC | | GCCTCACGGTT | | AGCCUCACGGUU |
| STMN2_ | − | TT | 137 | CCTGCAGACGTTCAATAA | 355 | CCUGCAGACGUUCAAUAA |
| exon5 | | TT | | TAGCAGCTAGAT | | UAGCAGCUAGAU |
| STMN2_ | − | CT | 138 | TCCTGCAGACGTTCAATA | 356 | UCCUGCAGACGUUCAAUA |
| exon5 | | TT | | ATAGCAGCTAGA | | AUAGCAGCUAGA |
| STMN2_ | − | AT | 139 | CCTTTTCCTGCAGACGTT | 357 | CCUUUUCCUGCAGACGUU |
| exon5 | | TA | | CAATAATAGCAG | | CAAUAAUAGCAG |
| STMN2_ | + | AT | 140 | AACGTCTGCAGGAAAAGG | 358 | AACGUCUGCAGGAAAAGG |
| exon5 | | TG | | TAATCTCAGCAG | | UAAUCUCAGCAG |
| STMN2_ | − | GT | 141 | CCTCTTCTCTGCCAATTGT | 359 | CCUCUUCUCUGCCAAUUG |
| exon5 | | TC | | TTCAGCACCTG | | UUUCAGCACCUG |
| STMN2_ | − | AT | 142 | TCAGGATCAGCTTTTCCT | 360 | UCAGGAUCAGCUUUUCCU |
| exon5 | | TT | | CCGCCATCTTGC | | CCGCCAUCUUGC |
| STMN2_ | − | GT | 143 | CATTTTCAGGATCAGCTTT | 361 | CAUUUUCAGGAUCAGCUU |
| exon5 | | TC | | TCCTCCGCCAT | | UUCCUCCGCCAU |
| STMN2_ | + | CT | 144 | AGAAGGCTTTGGAGGAGA | 362 | AGAAGGCUUUGGAGGAGA |
| exon5 | | TC | | ACAACAACTTCA | | ACAACAACUUCA |
| STMN2_ | + | TT | 145 | GATAATTATAAGATGGCTA | 363 | GAUAAUUAUAAGAUGGCU |
| exon5 | | TG | | TGTTTTTCTTC | | AUGUUUUUCUUC |
| STMN2_ | + | AT | 146 | TAAGATGGCTATGTTTTTC | 364 | UAAGAUGGCUAUGUUUUU |
| exon5 | | TA | | TTCCCCAGTCT | | CUUCCCCAGUCU |
| STMN2_ | + | GT | 147 | TTCTTCCCCAGTCTCAGG | 365 | UUCUUCCCCAGUCUCAGG |
| exon5 | | TT | | AGGCCCAGGTGC | | AGGCCCAGGUGC |
| STMN2_ | + | TT | 148 | TCTTCCCCAGTCTCAGGA | 366 | UCUUCCCCAGUCUCAGGA |
| exon5 | | TT | | GGCCCAGGTGCT | | GGCCCAGGUGCU |
| STMN2_ | + | TT | 149 | CTTCCCCAGTCTCAGGAG | 367 | CUUCCCCAGUCUCAGGAG |
| exon5 | | TT | | GCCCAGGTGCTG | | GCCCAGGUGCUG |
| STMN2_ | + | TT | 150 | TTCCCCAGTCTCAGGAGG | 368 | UUCCCCAGUCUCAGGAGG |
| exon5 | | TC | | CCCAGGTGCTGA | | CCCAGGUGCUGA |
| STMN2_ | + | CT | 151 | CCCAGTCTCAGGAGGCCC | 369 | CCCAGUCUCAGGAGGCCC |
| exon5 | | TC | | AGGTGCTGAAAC | | AGGUGCUGAAAC |
| STMN2_ | + | AT | 152 | GCAGAGAAGAGGGAACA | 370 | GCAGAGAAGAGGGAACAC |
| exon5 | | TG | | CGAGCGAGAAGTC | | GAGCGAGAAGUC |
| STMN2_ | − | TT | 153 | TTCCATTTTCAGGATCAGC | 371 | UUCCAUUUUCAGGAUCAG |
| exon5 | | TG | | TTTTCCTCCGC | | CUUUUCCUCCGC |
| STMN2_ | + | GT | 154 | GGATAATTATAAGATGGC | 372 | GGAUAAUUAUAAGAUGGC |
| exon5 | | TT | | TATGTTTTTCTT | | UAUGUUUUUCUU |
| STMN2_ | + | CT | 155 | GGAGGAGAACAACAACTT | 373 | GGAGGAGAACAACAACUU |
| exon5 | | TT | | CAGCAAGATGGC | | CAGCAAGAUGGC |
| STMN2_ | + | CT | 156 | AGCAAGATGGCGGAGGA | 374 | AGCAAGAUGGCGGAGGAA |
| exon5 | | TC | | AAAGCTGATCCTG | | AAGCUGAUCCUG |
| STMN2_ | + | AT | 157 | AGGAAAACCGTGAGGCTA | 375 | AGGAAAACCGUGAGGCUA |
| exon5 | | TA | | ATCTAGCTGCTA | | AUCUAGCUGCUA |
| STMN2_ | + | AT | 158 | TTGAACGTCTGCAGGAAA | 376 | UUGAACGUCUGCAGGAAA |
| exon5 | | TA | | AGGTAATCTCAG | | AGGUAAUCUCAG |
| STMN2_ | − | AT | 159 | GCCTCACGGTTTTCCTTA | 377 | GCCUCACGGUUUUCCUUA |
| exon5 | | TA | | ATTTGTTCCATT | | AUUUGUUCCAUU |
| STMN2_ | − | GT | 160 | TCCTTAATTTGTTCCATTT | 378 | UCCUUAAUUUGUUCCAUU |
| exon5 | | TT | | TCAGGATCAGC | | UUCAGGAUCAGC |
| STMN2_ | − | TT | 161 | CCTTAATTTGTTCCATTTT | 379 | CCUUAAUUUGUUCCAUUU |
| exon5 | | TT | | CAGGATCAGCT | | UCAGGAUCAGCU |
| STMN2_ | − | TT | 162 | CTTAATTTGTTCCATTTTC | 380 | CUUAAUUUGUUCCAUUUU |
| exon5 | | TC | | AGGATCAGCTT | | CAGGAUCAGCUU |
| STMN2_ | − | CT | 163 | ATTTGTTCCATTTTCAGGA | 381 | AUUUGUUCCAUUUUCAGG |
| exon5 | | TA | | TCAGCTTTTCC | | AUCAGCUUUUCC |
| STMN2_ | − | AT | 164 | GTTCCATTTTCAGGATCA | 382 | GUUCCAUUUUCAGGAUCA |
| exon5 | | TT | | GCTTTTCCTCCG | | GCUUUUCCUCCG |
| STMN2_ | + | TT | 165 | GAGGAGAACAACAACTTC | 383 | GAGGAGAACAACAACUUC |
| exon5 | | TG | | AGCAAGATGGCG | | AGCAAGAUGGCG |
| STMN2_ | + | TT | 166 | TGTTTGGATAATTATAAGA | 384 | UGUUUGGAUAAUUAUAAG |
| exon5 | | TG | | TGGCTATGTTT | | AUGGCUAUGUUU |
| STMN2_ | − | CT | 167 | TAATTATCCAAACACAAAC | 385 | UAAUUAUCCAAACACAAA |
| exon5 | | TA | | CTAG | | CCUAG |
| STMN2_ | − | GT | 168 | AGAAGAAATAAACTTGAC | 386 | AGAAGAAAUAAACUUGAC |
| exon6 | | TC | | CAGCTATAAAGT | | CAGCUAUAAAGU |
| STMN2_ | − | CT | 169 | TCGTTAAACTCTATTAATC | 387 | UCGUUAAACUCUAUUAAU |
| exon6 | | TA | | TCAAGGAGTCT | | CUCAAGGAGUCU |
| STMN2_ | − | TT | 170 | GTTCAGAAGAAATAAACTT | 388 | GUUCAGAAGAAAUAAACU |
| exon6 | | TA | | GACCAGCTATA | | UGACCAGCUAUA |
| STMN2_ | − | CT | 171 | ACCAGCTATAAAGTAAAA | 389 | ACCAGCUAUAAAGUAAAA |
| exon6 | | TG | | CTTATCGTTAAA | | CUUAUCGUUAAA |
| STMN2_ | − | CT | 172 | TAGTTCAGAAGAAATAAAC | 390 | UAGUUCAGAAGAAAUAAA |
| exon6 | | TT | | TTGACCAGCTA | | CUUGACCAGCUA |
| STMN2_ | + | CT | 173 | AGATTAATAGAGTTTAACG | 391 | AGAUUAAUAGAGUUUAAC |
| exon6 | | TG | | ATAAGTTTTAC | | GAUAAGUUUUAC |
| STMN2_ | + | AT | 174 | ATAGAGTTTAACGATAAGT | 392 | AUAGAGUUUAACGAUAAG |
| exon6 | | TA | | TTTACTTTATA | | UUUUACUUUAUA |
| STMN2_ | + | GT | 175 | AACGATAAGTTTTACTTTA | 393 | AACGAUAAGUUUUACUUU |
| exon6 | | TT | | TAGCTGGTCAA | | AUAGCUGGUCAA |
| STMN2_ | + | TT | 176 | ACGATAAGTTTTACTTTAT | 394 | ACGAUAAGUUUUACUUUA |
| exon6 | | TA | | AGCTGGTCAAG | | UAGCUGGUCAAG |
| STMN2_ | + | GT | 177 | TACTTTATAGCTGGTCAAG | 395 | UACUUUAUAGCUGGUCAA |
| exon6 | | TT | | TTTATTTCTTC | | GUUUAUUUCUUC |
| STMN2_ | + | TT | 178 | ACTTTATAGCTGGTCAAGT | 396 | ACUUUAUAGCUGGUCAAG |
| exon6 | | TT | | TTATTTCTTCT | | UUUAUUUCUUCU |
| STMN2_ | + | TT | 179 | CTTTATAGCTGGTCAAGTT | 397 | CUUUAUAGCUGGUCAAGU |
| exon6 | | TA | | TATTTCTTCTG | | UUAUUUCUUCUG |
| STMN2_ | + | CT | 180 | ATAGCTGGTCAAGTTTATT | 398 | AUAGCUGGUCAAGUUUAU |
| exon6 | | TT | | TCTTCTGAACT | | UUCUUCUGAACU |
| STMN2_ | + | TT | 181 | TAGCTGGTCAAGTTTATTT | 399 | UAGCUGGUCAAGUUUAUU |
| exon6 | | TA | | CTTCTGAACTA | | UCUUCUGAACUA |
| STMN2_ | + | GT | 182 | ATTTCTTCTGAACTAAAAG | 400 | AUUUCUUCUGAACUAAAA |
| exon6 | | TT | | AATCTATAGAG | | GAAUCUAUAGAG |
| STMN2_ | + | TT | 183 | TTTCTTCTGAACTAAAAGA | 401 | UUUCUUCUGAACUAAAAG |
| exon6 | | TA | | ATCTATAGAGT | | AAUCUAUAGAGU |
| STMN2_ | + | AT | 184 | CTTCTGAACTAAAAGAATC | 402 | CUUCUGAACUAAAAGAAU |
| exon6 | | TT | | TATAGAGTCTC | | CUAUAGAGUCUC |
| STMN2_ | + | TT | 185 | TTCTGAACTAAAAGAATCT | 403 | UUCUGAACUAAAAGAAUC |
| exon6 | | TC | | ATAGAGTCTCA | | UAUAGAGUCUCA |
| STMN2_ | + | CT | 186 | TGAACTAAAAGAATCTATA | 404 | UGAACUAAAAGAAUCUAU |
| exon6 | | TC | | GAGTCTCAATT | | AGAGUCUCAAUU |
| STMN2_ | + | AT | 187 | CTGGAGCTTCAGAGGGAA | 405 | CUGGAGCUUCAGAGGGAA |
| exon6 | | TT | | GGAGAGAAGCAA | | GGAGAGAAGCAA |
| STMN2_ | + | TT | 188 | TGGAGCTTCAGAGGGAAG | 406 | UGGAGCUUCAGAGGGAA |
| exon6 | | TC | | GAGAGAAGCAAT | | GGAGAGAAGCAAU |
| STMN2_ | + | CT | 189 | AGAGGGAAGGAGAGAAG | 407 | AGAGGGAAGGAGAGAAGC |
| exon6 | | TC | | CAATGTAAGCAAC | | AAUGUAAGCAAC |
| STMN2_ | − | AT | 190 | TTTTAGTTCAGAAGAAATA | 408 | UUUUAGUUCAGAAGAAAU |
| exon6 | | TC | | AACTTGACCAG | | AAACUUGACCAG |
| STMN2_ | − | AT | 191 | AGACTCTATAGATTCTTTT | 409 | AGACUCUAUAGAUUCUUU |
| exon6 | | TG | | AGTTCAGAAGA | | UAGUUCAGAAGA |
| STMN2_ | − | CT | 192 | CCTCTGAAGCTCCAGAAA | 410 | CCUCUGAAGCUCCAGAAA |
| exon6 | | TC | | TTGAGACTCTAT | | UUGAGACUCUAU |
| STMN2_ | − | CT | 193 | TCTCCTTCCCTCTGAAGC | 411 | UCUCCUUCCCUCUGAAGC |
| exon6 | | TC | | TCCAGAAATTGA | | UCCAGAAAUUGA |
| STMN2_ | − | AT | 194 | CTTCTCTCCTTCCCTCTGA | 412 | CUUCUCUCCUUCCCUCUG |
| exon6 | | TG | | AGCTCCAGAAA | | AAGCUCCAGAAA |
| STMN2_ | − | CT | 195 | CATTGCTTCTCTCCTTCCC | 413 | CAUUGCUUCUCUCCUUCC |
| exon6 | | TA | | TCTGAAGCTCC | | CUCUGAAGCUCC |
| STMN2_ | − | TT | 196 | AGTTCAGAAGAAATAAACT | 414 | AGUUCAGAAGAAAUAAAC |
| exon6 | | TT | | TGACCAGCTAT | | UUGACCAGCUAU |
| STMN2_ | − | TT | 197 | TGTAGAATGTTGCTTACAT | 415 | UGUAGAAUGUUGCUUACA |
| exon6 | | TC | | TGCTTCTCTCC | | UUGCUUCUCUCC |
| STMN2_ | − | TT | 198 | TATTTCTGTAGAATGTTGC | 416 | UAUUUCUGUAGAAUGUUG |
| exon6 | | TA | | TTACATTGCTT | | CUUACAUUGCUU |
| STMN2_ | − | AT | 199 | ATATTTCTGTAGAATGTTG | 417 | AUAUUUCUGUAGAAUGUU |
| exon6 | | TT | | CTTACATTGCT | | GCUUACAUUGCU |
| STMN2_ | − | AT | 200 | TTTATATTTCTGTAGAATG | 418 | UUUAUAUUUCUGUAGAAU |
| exon6 | | TA | | TTGCTTACATT | | GUUGCUUACAUU |
| STMN2_ | − | AT | 201 | GTAGTATTATTTATATTTC | 419 | GUAGUAUUAUUUAUAUUU |
| exon6 | | TA | | TGTAGAATGTT | | CUGUAGAAUGUU |
| STMN2_ | − | AT | 202 | TTAGTAGTATTATTTATATT | 420 | UUAGUAGUAUUAUUUAUA |
| exon6 | | TA | | TCTGTAGAAT | | UUUCUGUAGAAU |
| STMN2_ | + | AT | 203 | TACAGAAATATAAATAATA | 421 | UACAGAAAUAUAAAUAAUA |
| exon6 | | TC | | CTACTAATAAT | | CUACUAAUAAU |
| STMN2_ | − | AT | 204 | CTGTAGAATGTTGCTTACA | 422 | CUGUAGAAUGUUGCUUAC |
| exon6 | | TT | | TTGCTTCTCTC | | AUUGCUUCUCUC |
| STMN2_ | − | GT | 205 | CTTACATTGCTTCTCTCCT | 423 | CUUACAUUGCUUCUCUCC |
| exon6 | | TG | | TCCCTCTGAAG | | UUCCCUCUGAAG |
| STMN2_ | − | GT | 206 | AACTCTATTAATCTCAAGG | 424 | AACUCUAUUAAUCUCAAG |
| exon6 | | TA | | AGTCTACA | | GAGUCUACA |
| STMN2_ | + | TT | 207 | GTGTTTTTTAGGAGAGGC | 425 | GUGUUUUUUAGGAGAGG |
| exon7 | | TT | | ATGCTGCGGAGG | | CAUGCUGCGGAGG |
| STMN2_ | + | TT | 208 | TTCTTCCTTTTGTGTTTTTT | 426 | UUCUUCCUUUUGUGUUUU |
| exon7 | | TC | | AGGAGAGGCA | | UUAGGAGAGGCA |
| STMN2_ | + | TT | 209 | TGTTTTTTAGGAGAGGCA | 427 | UGUUUUUUAGGAGAGGCA |
| exon7 | | TG | | TGCTGCGGAGGT | | UGCUGCGGAGGU |
| STMN2_ | + | GT | 210 | TTTAGGAGAGGCATGCTG | 428 | UUUAGGAGAGGCAUGCU |
| exon7 | | TT | | CGGAGGTGCGCA | | GCGGAGGUGCGCA |
| STMN2_ | + | CT | 211 | CTTTTGTGTTTTTTAGGAG | 429 | CUUUUGUGUUUUUUAGGA |
| exon7 | | TC | | AGGCATGCTGC | | GAGGCAUGCUGC |
| STMN2_ | + | TT | 212 | TAGGAGAGGCATGCTGCG | 430 | UAGGAGAGGCAUGCUGC |
| exon7 | | TT | | GAGGTGCGCAGG | | GGAGGUGCGCAGG |
| STMN2_ | + | TT | 213 | AGGAGAGGCATGCTGCG | 431 | AGGAGAGGCAUGCUGCG |
| exon7 | | TT | | GAGGTGCGCAGGA | | GAGGUGCGCAGGA |
| STMN2_ | + | TT | 214 | GGAGAGGCATGCTGCGG | 432 | GGAGAGGCAUGCUGCGG |
| exon7 | | TA | | AGGTGCGCAGGAA | | AGGUGCGCAGGAA |
| STMN2_ | + | GT | 215 | AACTGTCTGGCTGAAGCA | 433 | AACUGUCUGGCUGAAGCA |
| exon7 | | TG | | AGGGAGGGTCTG | | AGGGAGGGUCUG |
| STMN2_ | − | AT | 216 | ACTATTGGTGGGGCGTGC | 434 | ACUAUUGGUGGGGCGUG |
| exon7 | | TT | | CAGACCCTCCCT | | CCAGACCCUCCCU |
| STMN2_ | + | AT | 217 | CTTCTTCCTTTTGTGTTTT | 435 | CUUCUUCCUUUUGUGUUU |
| exon7 | | TT | | TTAGGAGAGGC | | UUUAGGAGAGGC |
| STMN2_ | − | TT | 218 | CTATTGGTGGGGCGTGCC | 436 | CUAUUGGUGGGGCGUGC |
| exon7 | | TA | | AGACCCTCCCTT | | CAGACCCUCCCUU |
| STMN2_ | − | CT | 219 | CTTCAGCCAGACAGTTCA | 437 | CUUCAGCCAGACAGUUCA |
| exon7 | | TG | | ACCTGGAGTTCC | | ACCUGGAGUUCC |
| STMN2_ | − | CT | 220 | AGCCAGACAGTTCAACCT | 438 | AGCCAGACAGUUCAACCU |
| exon7 | | TC | | GGAGTTCCTTGT | | GGAGUUCCUUGU |
| STMN2_ | − | GT | 221 | AACCTGGAGTTCCTTGTT | 439 | AACCUGGAGUUCCUUGUU |
| exon7 | | TC | | CCTGCGCACCTC | | CCUGCGCACCUC |
| STMN2_ | − | GT | 222 | CTTGTTCCTGCGCACCTC | 440 | CUUGUUCCUGCGCACCUC |
| exon7 | | TC | | CGCAGCATGCCT | | CGCAGCAUGCCU |
| STMN2_ | − | CT | 223 | TTCCTGCGCACCTCCGCA | 441 | UUCCUGCGCACCUCCGCA |
| exon7 | | TG | | GCATGCCTCTCC | | GCAUGCCUCUCC |
| STMN2_ | − | GT | 224 | CTGCGCACCTCCGCAGCA | 442 | CUGCGCACCUCCGCAGCA |
| exon7 | | TC | | TGCCTCTCCTAA | | UGCCUCUCCUAA |
| STMN2_ | + | CT | 225 | TGTGTTTTTTAGGAGAGG | 443 | UGUGUUUUUUAGGAGAG |
| exon7 | | TT | | CATGCTGCGGAG | | GCAUGCUGCGGAG |
| STMN2_ | + | CT | 226 | TTCCTTTTGTGTTTTTTAG | 444 | UUCCUUUUGUGUUUUUUA |
| exon7 | | TC | | GAGAGGCATGC | | GGAGAGGCAUGC |
| STMN2_ | − | AT | 227 | GTGGGGCGTGCCAGACC | 445 | GUGGGGCGUGCCAGACC |
| exon7 | | TG | | CTCCCTTGCTTCA | | CUCCCUUGCUUCA |
| STMN2_ | + | TT | 228 | TTAGGAGAGGCATGCTGC | 446 | UUAGGAGAGGCAUGCUG |
| exon7 | | TT | | GGAGGTGCGCAG | | CGGAGGUGCGCAG |

TABLE 5B
Target and Spacer Sequences − Intron

| ref_id | strand | PAM | | target | | spacer |
|---|---|---|---|---|---|---|
| STMN2_ | + | GTT | 491 | TCCGTCGGCTCTACCT | 2497 | UCCGUCGGCUCUACCU |
| intron1 | | C | | GGAGCCCACCTCTC | | GGAGCCCACCUCUC |
| STMN2_ | − | ATT | 492 | GGAAGTATTTTCTCTT | 2498 | GGAAGUAUUUUCUCUU |
| intron1 | | T | | CAAGGTGAGTCTGT | | CAAGGUGAGUCUGU |
| STMN2_ | − | ATT | 493 | AAACTAGGCATCAAT | 2499 | AAACUAGGCAUCAAUU |
| intron1 | | A | | TTGGAAGTATTTTCT | | UGGAAGUAUUUUCU |
| STMN2_ | − | TTT | 494 | AATAAGCCCCAGGTA | 2500 | AAUAAGCCCCAGGUAA |
| intron1 | | G | | AGCTATTAAAACTAG | | GCUAUUAAAACUAG |
| STMN2_ | − | ATT | 495 | GAATAAGCCCCAGGT | 2501 | GAAUAAGCCCCAGGUA |
| intron1 | | T | | AAGCTATTAAAACTA | | AGCUAUUAAAACUA |
| STMN2_ | − | ATT | 496 | TTTGAATAAGCCCCAG | 2502 | UUUGAAUAAGCCCCAG |
| intron1 | | A | | GTAAGCTATTAAAA | | GUAAGCUAUUAAAA |
| STMN2_ | − | TTTC | 497 | TCCCAAAGCCTAAATC | 2503 | UCCCAAAGCCUAAAUC |
| intron1 | | | | ATGGCAATTATTTG | | AUGGCAAUUAUUUG |
| STMN2_ | − | CTTT | 498 | CTCCCAAAGCCTAAAT | 2504 | CUCCCAAAGCCUAAAU |
| intron1 | | | | CATGGCAATTATTT | | CAUGGCAAUUAUUU |
| STMN2_ | − | GTT | 499 | CAACCCACACGGCCTC | 2505 | CAACCCACACGGCCUC |
| intron1 | | A | | ATAGCTCTCTTTCT | | AUAGCUCUCUUUCU |
| STMN2_ | − | GTT | 500 | CCACCAGAAATCGAT | 2506 | CCACCAGAAAUCGAUG |
| intron1 | | C | | GCTGTGCTGAGCCTG | | CUGUGCUGAGCCUG |
| STMN2_ | − | TTTC | 501 | TGGAACTGGTCATCA | 2507 | UGGAACUGGUCAUCAG |
| intron1 | | | | GAGTGTGTTCCCACC | | AGUGUGUUCCCACC |
| STMN2_ | − | ATT | 502 | CTGGAACTGGTCATCA | 2508 | CUGGAACUGGUCAUCA |
| intron1 | | T | | GAGTGTGTTCCCAC | | GAGUGUGUUCCCAC |
| STMN2_ | − | GTT | 503 | TTTCTGGAACTGGTCA | 2509 | UUUCUGGAACUGGUCA |
| intron1 | | A | | TCAGAGTGTGTTCC | | UCAGAGUGUGUUCC |
| STMN2_ | − | ATT | 504 | AGTCAATGTTATTTCT | 2510 | AGUCAAUGUUAUUUCU |
| intron1 | | A | | GGAACTGGTCATCA | | GGAACUGGUCAUCA |
| STMN2_ | − | TTT | 505 | AAATGTGCTAACCAT | 2511 | AAAUGUGCUAACCAUG |
| intron1 | | G | | GATGGGACTGAGGAG | | AUGGGACUGAGGAG |
| STMN2_ | − | TTTT | 506 | GAAATGTGCTAACCA | 2512 | GAAAUGUGCUAACCAU |
| intron1 | | | | TGATGGGACTGAGGA | | GAUGGGACUGAGGA |
| STMN2_ | − | ATT | 507 | TGAAATGTGCTAACC | 2513 | UGAAAUGUGCUAACCA |
| intron1 | | T | | ATGATGGGACTGAGG | | UGAUGGGACUGAGG |
| STMN2_ | − | GTT | 508 | AGGAGGCATTTTGAA | 2514 | AGGAGGCAUUUUGAAA |
| intron1 | | A | | ATGTGCTAACCATGA | | UGUGCUAACCAUGA |
| STMN2_ | − | GTT | 509 | AAACTAAATATCTCTG | 2515 | AAACUAAAUAUCUCUG |
| intron1 | | A | | GCCTATGGAAGTAG | | GCCUAUGGAAGUAG |
| STMN2_ | − | ATT | 510 | AACAAAATGTTAAAA | 2516 | AACAAAAUGUUAAAAC |
| intron1 | | C | | CTAAATATCTCTGGC | | UAAAUAUCUCUGGC |
| STMN2_ | − | TTT | 511 | TTCAACAAAATGTTAA | 2517 | UUCAACAAAAUGUUAA |
| intron1 | | A | | AACTAAATATCTCT | | AACUAAAUAUCUCU |
| STMN2_ | − | TTTT | 512 | ATTCAACAAAATGTTA | 2518 | AUUCAACAAAAUGUUA |
| intron1 | | | | AAACTAAATATCTC | | AAACUAAAUAUCUC |
| STMN2_ | − | ATT | 513 | TATTCAACAAAATGTT | 2519 | UAUUCAACAAAAUGUU |
| intron1 | | T | | AAAACTAAATATCT | | AAAACUAAAUAUCU |
| STMN2_ | − | TTT | 514 | TTTTATTCAACAAAAT | 2520 | UUUUAUUCAACAAAAU |
| intron1 | | A | | GTTAAAACTAAATA | | GUUAAAACUAAAUA |
| STMN2_ | − | ATT | 515 | ATTTTATTCAACAAAA | 2521 | AUUUUAUUCAACAAAA |
| intron1 | | T | | TGTTAAAACTAAAT | | UGUUAAAACUAAAU |
| STMN2_ | − | ATT | 516 | AATGTGAATGTGTAA | 2522 | AAUGUGAAUGUGUAAA |
| intron1 | | A | | atttattttattcaa | | UUUAUUUUAUUCAA |
| STMN2_ | − | GTT | 517 | TATTAAATGTGAATGT | 2523 | UAUUAAAUGUGAAUGU |
| intron1 | | A | | GTAAATTTATTTTA | | GUAAAUUUAUUUUA |
| STMN2_ | − | CTT | 518 | AAATAACATCTAATA | 2524 | AAAUAACAUCUAAUAG |
| intron1 | | G | | GTTATATTAAATGTG | | UUAUAUUAAAUGUG |
| STMN2_ | − | TTT | 519 | GAAGTATTTTCTCTTC | 2525 | GAAGUAUUUUCUCUUC |
| intron1 | | G | | AAGGTGAGTCTGTG | | AAGGUGAGUCUGUG |
| STMN2_ | − | TTT | 520 | ATGGTAATATGAAGA | 2526 | AUGGUAAUAUGAAGAG |
| intron1 | | G | | GAATCTTGAAATAAC | | AAUCUUGAAAUAAC |
| STMN2_ | − | ATT | 521 | TCTCTTCAAGGTGAGT | 2527 | UCUCUUCAAGGUGAGU |
| intron1 | | T | | CTGTGATCAGAAAG | | CUGUGAUCAGAAAG |
| STMN2_ | − | TTTC | 522 | TCTTCAAGGTGAGTCT | 2528 | UCUUCAAGGUGAGUCU |
| intron1 | | | | GTGATCAGAAAGGA | | GUGAUCAGAAAGGA |
| STMN2_ | − | ATT | 523 | CGGGAAAATGTTTGA | 2529 | CGGGAAAAUGUUUGAG |
| intron1 | | G | | GTAAAGAAATAGGAA | | UAAAGAAAUAGGAA |
| STMN2_ | − | GTT | 524 | AAAGAAAGCACCATT | 2530 | AAAGAAAGCACCAUUG |
| intron1 | | G | | GCGGGAAAATGTTTG | | CGGGAAAAUGUUUG |
| STMN2_ | − | TTT | 525 | TGAATACACCAGAAA | 2531 | UGAAUACACCAGAAAA |
| intron1 | | A | | AACAGTTGAAAGAAA | | ACAGUUGAAAGAAA |
| STMN2_ | − | ATT | 526 | ATGAATACACCAGAA | 2532 | AUGAAUACACCAGAAA |
| intron1 | | T | | AAACAGTTGAAAGAA | | AACAGUUGAAAGAA |
| STMN2_ | − | CTT | 527 | CCATAGAGAATCTGG | 2533 | CCAUAGAGAAUCUGGA |
| intron1 | | C | | AATTTATGAATACAC | | AUUUAUGAAUACAC |
| STMN2_ | − | GTT | 528 | CTTCCCATAGAGAATC | 2534 | CUUCCCAUAGAGAAUC |
| intron1 | | A | | TGGAATTTATGAAT | | UGGAAUUUAUGAAU |
| STMN2_ | − | GTT | 529 | AATCAATCAATAAAA | 2535 | AAUCAAUCAAUAAAAG |
| intron1 | | A | | GTTACTTCCCATAGA | | UUACUUCCCAUAGA |
| STMN2_ | − | GTT | 530 | TATGTGCTATACAAGG | 2536 | UAUGUGCUAUACAAGG |
| intron1 | | A | | GTTAAATCAATCAA | | GUUAAAUCAAUCAA |
| STMN2_ | − | CTT | 531 | CATGTTATATGTGCTA | 2537 | CAUGUUAUAUGUGCUA |
| intron1 | | G | | TACAAGGGTTAAAT | | UACAAGGGUUAAAU |
| STMN2_ | − | CTT | 532 | GAACAATGCCTTGCAT | 2538 | GAACAAUGCCUUGCAU |
| intron1 | | A | | GTTATATGTGCTAT | | GUUAUAUGUGCUAU |
| STMN2_ | − | GTT | 533 | TTAGAACAATGCCTTG | 2539 | UUAGAACAAUGCCUUG |
| intron1 | | C | | CATGTTATATGTGC | | CAUGUUAUAUGUGC |
| STMN2_ | − | GTT | 534 | ATATGTGGAAAGTTCT | 2540 | AUAUGUGGAAAGUUCU |
| intron1 | | A | | TAGAACAATGCCTT | | UAGAACAAUGCCUU |
| STMN2_ | − | ATT | 535 | ACACAGTTAATATGTG | 2541 | ACACAGUUAAUAUGUG |
| intron1 | | A | | GAAAGTTCTTAGAA | | GAAAGUUCUUAGAA |
| STMN2_ | − | ATT | 536 | AGTGATTAACACAGTT | 2542 | AGUGAUUAACACAGUU |
| intron1 | | A | | AATATGTGGAAAGT | | AAUAUGUGGAAAGU |
| STMN2_ | − | ATT | 537 | TTAAGTGATTAACACA | 2543 | UUAAGUGAUUAACACA |
| intron1 | | A | | GTTAATATGTGGAA | | GUUAAUAUGUGGAA |
| STMN2_ | − | CTT | 538 | GGATTATTAAGTGATT | 2544 | GGAUUAUUAAGUGAUU |
| intron1 | | A | | AACACAGTTAATAT | | AACACAGUUAAUAU |
| STMN2_ | − | TTTC | 539 | CATATCTGTAATAGAA | 2545 | CAUAUCUGUAAUAGAA |
| intron1 | | | | CCTACTTAGGATTA | | CCUACUUAGGAUUA |
| STMN2_ | − | GTT | 540 | CCATATCTGTAATAGA | 2546 | CCAUAUCUGUAAUAGA |
| intron1 | | T | | ACCTACTTAGGATT | | ACCUACUUAGGAUU |
| STMN2_ | − | TTTC | 541 | TGTGCCTCAGTTTCCA | 2547 | UGUGCCUCAGUUUCCA |
| intron1 | | | | TATCTGTAATAGAA | | UAUCUGUAAUAGAA |
| STMN2_ | − | CTTT | 542 | CTGTGCCTCAGTTTCC | 2548 | CUGUGCCUCAGUUUCC |
| intron1 | | | | ATATCTGTAATAGA | | AUAUCUGUAAUAGA |
| STMN2_ | − | CTT | 543 | AACTTTCTGTGCCTCA | 2549 | AACUUUCUGUGCCUCA |
| intron1 | | C | | GTTTCCATATCTGT | | GUUUCCAUAUCUGU |
| STMN2_ | − | CTT | 544 | AGTAAGATACTTCAA | 2550 | AGUAAGAUACUUCAAC |
| intron1 | | G | | CTTTCTGTGCCTCAG | | UUUCUGUGCCUCAG |
| STMN2_ | − | ATT | 545 | TGGATCTGACTAACTG | 2551 | UGGAUCUGACUAACUG |
| intron1 | | C | | TGTGACCTTGAGTA | | UGUGACCUUGAGUA |
| STMN2_ | − | ATT | 546 | CGAAGCCAGATGGCC | 2552 | CGAAGCCAGAUGGCCU |
| intron1 | | C | | TGGGCCCAAATTCTG | | GGGCCCAAAUUCUG |
| STMN2_ | − | TTT | 547 | AATAAAATGGTGATA | 2553 | AAUAAAAUGGUGAUAU |
| intron1 | | A | | TCACAGGTGTGACCT | | CACAGGUGUGACCU |
| STMN2_ | − | GTT | 548 | AAATAAAATGGTGAT | 2554 | AAAUAAAAUGGUGAUA |
| intron1 | | T | | ATCACAGGTGTGACC | | UCACAGGUGUGACC |
| STMN2_ | − | CTT | 549 | AAGGTGAGTCTGTGA | 2555 | AAGGUGAGUCUGUGAU |
| intron1 | | C | | TCAGAAAGGAGAAGA | | CAGAAAGGAGAAGA |
| STMN2_ | − | TTTT | 550 | CTCTTCAAGGTGAGTC | 2556 | CUCUUCAAGGUGAGUC |
| intron1 | | | | TGTGATCAGAAAGG | | UGUGAUCAGAAAGG |
| STMN2_ | − | CTTT | 551 | GATGGTAATATGAAG | 2557 | GAUGGUAAUAUGAAGA |
| intron1 | | | | AGAATCTTGAAATAA | | GAAUCUUGAAAUAA |
| STMN2_ | − | GTT | 552 | TCTCCTGCCTGCCTGC | 2558 | UCUCCUGCCUGCCUGC |
| intron1 | | C | | CTGCTTTGATGGTA | | CUGCUUUGAUGGUA |
| STMN2_ | − | CTT | 553 | CTACAGTTCTCTCCTG | 2559 | CUACAGUUCUCUCCUG |
| intron1 | | C | | CCTGCCTGCCTGCT | | CCUGCCUGCCUGCU |
| STMN2_ | − | ATT | 554 | TTGTTATGGTTTTATA | 2560 | UUGUUAUGGUUUUAUA |
| intron1 | | T | | GTATAATATGTGGC | | GUAUAAUAUGUGGC |
| STMN2_ | − | CTT | 555 | AAATATTTTTGTTATG | 2561 | AAAUAUUUUUGUUAUG |
| intron1 | | A | | GTTTTATAGTATAA | | GUUUUAUAGUAUAA |
| STMN2_ | − | TTT | 556 | CTCTGGAGGTCAACA | 2562 | CUCUGGAGGUCAACAA |
| intron1 | | A | | ACAAGTGAGAACAAA | | CAAGUGAGAACAAA |
| STMN2_ | − | TTTT | 557 | ACTCTGGAGGTCAAC | 2563 | ACUCUGGAGGUCAACA |
| intron1 | | | | AACAAGTGAGAACAA | | ACAAGUGAGAACAA |
| STMN2_ | − | ATT | 558 | TACTCTGGAGGTCAAC | 2564 | UACUCUGGAGGUCAAC |
| intron1 | | T | | AACAAGTGAGAACA | | AACAAGUGAGAACA |
| STMN2_ | − | ATT | 559 | AATATTTTACTCTGGA | 2565 | AAUAUUUUACUCUGGA |
| intron1 | | A | | GGTCAACAACAAGT | | GGUCAACAACAAGU |
| STMN2_ | − | TTTC | 560 | CAGAGTATTAAATATT | 2566 | CAGAGUAUUAAAUAUU |
| intron1 | | | | TTACTCTGGAGGTC | | UUACUCUGGAGGUC |
| STMN2_ | − | CTTT | 561 | CCAGAGTATTAAATAT | 2567 | CCAGAGUAUUAAAUAU |
| intron1 | | | | TTTACTCTGGAGGT | | UUUACUCUGGAGGU |
| STMN2_ | − | TTT | 562 | AAACCCATAACTTTCC | 2568 | AAACCCAUAACUUUCC |
| intron1 | | G | | AGAGTATTAAATAT | | AGAGUAUUAAAUAU |
| STMN2_ | − | TTTT | 563 | GAAACCCATAACTTTC | 2569 | GAAACCCAUAACUUUC |
| intron1 | | | | CAGAGTATTAAATA | | CAGAGUAUUAAAUA |
| STMN2_ | − | ATT | 564 | TGAAACCCATAACTTT | 2570 | UGAAACCCAUAACUUU |
| intron1 | | T | | CCAGAGTATTAAAT | | CCAGAGUAUUAAAU |
| STMN2_ | − | CTT | 565 | CCATAAAATAAATTTT | 2571 | CCAUAAAAUAAAUUUU |
| intron1 | | G | | GAAACCCATAACTT | | GAAACCCAUAACUU |
| STMN2_ | − | TTTC | 566 | TTGCCATAAAATAAAT | 2572 | UUGCCAUAAAAUAAAU |
| intron1 | | | | TTTGAAACCCATAA | | UUUGAAACCCAUAA |
| STMN2_ | − | ATT | 567 | CTTGCCATAAAATAA | 2573 | CUUGCCAUAAAAUAAA |
| intron1 | | T | | ATTTTGAAACCCATA | | UUUUGAAACCCAUA |
| STMN2_ | − | ATT | 568 | TCTATTTCTTGCCATA | 2574 | UCUAUUUCUUGCCAUA |
| intron1 | | A | | AAATAAATTTTGAA | | AAAUAAAUUUUGAA |
| STMN2_ | − | TTT | 569 | AATGTGCTCTATGAGA | 2575 | AAUGUGCUCUAUGAGA |
| intron1 | | A | | ACTGTAATTATCTA | | ACUGUAAUUAUCUA |
| STMN2_ | − | TTTT | 570 | AAATGTGCTCTATGAG | 2576 | AAAUGUGCUCUAUGAG |
| intron1 | | | | AACTGTAATTATCT | | AACUGUAAUUAUCU |
| STMN2_ | − | ATT | 571 | TAAATGTGCTCTATGA | 2577 | UAAAUGUGCUCUAUGA |
| intron1 | | T | | GAACTGTAATTATC | | GAACUGUAAUUAUC |
| STMN2_ | − | ATT | 572 | TTTTAAATGTGCTCTA | 2578 | UUUUAAAUGUGCUCUA |
| intron1 | | A | | TGAGAACTGTAATT | | UGAGAACUGUAAUU |
| STMN2_ | − | TTT | 573 | CCCTATAAAAATAAA | 2579 | CCCUAUAAAAAUAAAU |
| intron1 | | G | | TTATTTTAAATGTGC | | UAUUUUAAAUGUGC |
| STMN2_ | − | TTTT | 574 | GCCCTATAAAAATAA | 2580 | GCCCUAUAAAAAUAAA |
| intron1 | | | | ATTATTTTAAATGTG | | UUAUUUUAAAUGUG |
| STMN2_ | − | TTTT | 575 | TGCCCTATAAAAATA | 2581 | UGCCCUAUAAAAAUAA |
| intron1 | | | | AATTATTTTAAATGT | | AUUAUUUUAAAUGU |
| STMN2_ | − | ATT | 576 | TTGCCCTATAAAAATA | 2582 | UUGCCCUAUAAAAAUA |
| intron1 | | T | | AATTATTTTAAATG | | AAUUAUUUUAAAUG |
| STMN2_ | − | ATT | 577 | AGTCCTAGGCAATATT | 2583 | AGUCCUAGGCAAUAUU |
| intron1 | | C | | TTTGCCCTATAAAA | | UUUGCCCUAUAAAA |
| STMN2_ | − | TTT | 578 | TAAAAAAAAAAAAAT | 2584 | UAAAAAAAAAAAAAUC |
| intron1 | | G | | CATTCAGTCCTAGGC | | AUUCAGUCCUAGGC |
| STMN2_ | − | CTTT | 579 | GTAAAAAAAAAAAAA | 2585 | GUAAAAAAAAAAAAAU |
| intron1 | | | | TCATTCAGTCCTAGG | | CAUUCAGUCCUAGG |
| STMN2_ | − | TTT | 580 | CAATCTTTGTAAAAAA | 2586 | CAAUCUUUGUAAAAAA |
| intron1 | | A | | AAAAAAATCATTCA | | AAAAAAAUCAUUCA |
| STMN2_ | − | TTTT | 581 | TGTTATGGTTTTATAG | 2587 | UGUUAUGGUUUUAUAG |
| intron1 | | | | TATAATATGTGGCT | | UAUAAUAUGUGGCU |
| STMN2_ | − | TTTT | 582 | GTTATGGTTTTATAGT | 2588 | GUUAUGGUUUUAUAGU |
| intron1 | | | | ATAATATGTGGCTC | | AUAAUAUGUGGCUC |
| STMN2_ | − | TTT | 583 | TTATGGTTTTATAGTA | 2589 | UUAUGGUUUUAUAGUA |
| intron1 | | G | | TAATATGTGGCTCC | | UAAUAUGUGGCUCC |
| STMN2_ | − | GTT | 584 | TGGTTTTATAGTATAA | 2590 | UGGUUUUAUAGUAUAA |
| intron1 | | A | | TATGTGGCTCCTAC | | UAUGUGGCUCCUAC |
| STMN2_ | − | ATT | 585 | AAAACCTTCCTACAGT | 2591 | AAAACCUUCCUACAGU |
| intron1 | | C | | TCTCTCCTGCCTGC | | UCUCUCCUGCCUGC |
| STMN2_ | − | TTTC | 586 | ACAAGGGATTCAAAA | 2592 | ACAAGGGAUUCAAAAC |
| intron1 | | | | CCTTCCTACAGTTCT | | CUUCCUACAGUUCU |
| STMN2_ | − | GTT | 587 | CACAAGGGATTCAAA | 2593 | CACAAGGGAUUCAAAA |
| intron1 | | T | | ACCTTCCTACAGTTC | | CCUUCCUACAGUUC |
| STMN2_ | − | ATT | 588 | AAAATGTTTCACAAG | 2594 | AAAAUGUUUCACAAGG |
| intron1 | | A | | GGATTCAAAACCTTC | | GAUUCAAAACCUUC |
| STMN2_ | − | ATT | 589 | AAAGATAATTAAAAA | 2595 | AAAGAUAAUUAAAAAU |
| intron1 | | A | | TGTTTCACAAGGGAT | | GUUUCACAAGGGAU |
| STMN2_ | − | TTT | 590 | TTAAAAGATAATTAA | 2596 | UUAAAAGAUAAUUAAA |
| intron1 | | A | | AAATGTTTCACAAGG | | AAUGUUUCACAAGG |
| STMN2_ | − | CTTT | 591 | ATTAAAAGATAATTA | 2597 | AUUAAAAGAUAAUUAA |
| intron1 | | | | AAAATGTTTCACAAG | | AAAUGUUUCACAAG |
| STMN2_ | − | ATT | 592 | CTTTATTAAAAGATAA | 2598 | CUUUAUUAAAAGAUAA |
| intron1 | | C | | TTAAAAATGTTTCA | | UUAAAAAUGUUUCA |
| STMN2_ | − | CTT | 593 | ACAAATGACAGGGCC | 2599 | ACAAAUGACAGGGCCU |
| intron1 | | G | | TGATTCCTTTATTAA | | GAUUCCUUUAUUAA |
| STMN2_ | − | TTT | 594 | CTACTGCAAATGTCTC | 2600 | CUACUGCAAAUGUCUC |
| intron1 | | A | | CTTGACAAATGACA | | CUUGACAAAUGACA |
| STMN2_ | − | CTTT | 595 | ACTACTGCAAATGTCT | 2601 | ACUACUGCAAAUGUCU |
| intron1 | | | | CCTTGACAAATGAC | | CCUUGACAAAUGAC |
| STMN2_ | − | ATT | 596 | TAAACACAAGCTTTAC | 2602 | UAAACACAAGCUUUAC |
| intron1 | | A | | TACTGCAAATGTCT | | UACUGCAAAUGUCU |
| STMN2_ | − | TTT | 597 | ATCATGACTAATAAA | 2603 | AUCAUGACUAAUAAAA |
| intron1 | | A | | AATGGATATTATAAA | | AUGGAUAUUAUAAA |
| STMN2_ | − | GTT | 598 | GAGTAAAGAAATAGG | 2604 | GAGUAAAGAAAUAGGA |
| intron1 | | T | | AAGACTTATTGGCTC | | AGACUUAUUGGCUC |
| STMN2_ | − | CTTT | 599 | AATCATGACTAATAA | 2605 | AAUCAUGACUAAUAAA |
| intron1 | | | | AAATGGATATTATAA | | AAUGGAUAUUAUAA |
| STMN2_ | − | TTT | 600 | TGAGAACAAATGTAC | 2606 | UGAGAACAAAUGUACA |
| intron1 | | G | | ACAAATGTTATCTTT | | CAAAUGUUAUCUUU |
| STMN2_ | − | TTTT | 601 | GTGAGAACAAATGTA | 2607 | GUGAGAACAAAUGUAC |
| intron1 | | | | CACAAATGTTATCTT | | ACAAAUGUUAUCUU |
| STMN2_ | − | GTT | 602 | TGTGAGAACAAATGT | 2608 | UGUGAGAACAAAUGUA |
| intron1 | | T | | ACACAAATGTTATCT | | CACAAAUGUUAUCU |
| STMN2_ | − | TTT | 603 | CACTCATATAAAAGT | 2609 | CACUCAUAUAAAAGUG |
| intron1 | | A | | GTTTTGTGAGAACAA | | UUUUGUGAGAACAA |
| STMN2_ | − | CTTT | 604 | ACACTCATATAAAAG | 2610 | ACACUCAUAUAAAAGU |
| intron1 | | | | TGTTTTGTGAGAACA | | GUUUUGUGAGAACA |
| STMN2_ | − | ATT | 605 | ACCTTTACACTCATAT | 2611 | ACCUUUACACUCAUAU |
| intron1 | | A | | AAAAGTGTTTTGTG | | AAAAGUGUUUUGUG |
| STMN2_ | − | ATT | 606 | ATTAACCTTTACACTC | 2612 | AUUAACCUUUACACUC |
| intron1 | | A | | ATATAAAAGTGTTT | | AUAUAAAAGUGUUU |
| STMN2_ | − | TTTC | 607 | CACATGACCAGCAAA | 2613 | CACAUGACCAGCAAAA |
| intron1 | | | | ATGATGGCTGAAATG | | UGAUGGCUGAAAUG |
| STMN2_ | − | ATT | 608 | CCACATGACCAGCAA | 2614 | CCACAUGACCAGCAAA |
| intron1 | | T | | AATGATGGCTGAAAT | | AUGAUGGCUGAAAU |
| STMN2_ | − | ATT | 609 | CTAAAGAAGCTATATT | 2615 | CUAAAGAAGCUAUAUU |
| intron1 | | C | | TCCACATGACCAGC | | UCCACAUGACCAGC |
| STMN2_ | − | TTT | 610 | TAGTATAATATGTGGC | 2616 | UAGUAUAAUAUGUGGC |
| intron1 | | A | | TCCTACTCTAAGTA | | UCCUACUCUAAGUA |
| STMN2_ | − | TTTT | 611 | ATAGTATAATATGTGG | 2617 | AUAGUAUAAUAUGUGG |
| intron1 | | | | CTCCTACTCTAAGT | | CUCCUACUCUAAGU |
| STMN2_ | − | GTT | 612 | TATAGTATAATATGTG | 2618 | UAUAGUAUAAUAUGUG |
| intron1 | | T | | GCTCCTACTCTAAG | | GCUCCUACUCUAAG |
| STMN2_ | − | GTT | 613 | TCTTTAATCATGACTA | 2619 | UCUUUAAUCAUGACUA |
| intron1 | | A | | ATAAAAATGGATAT | | AUAAAAAUGGAUAU |
| STMN2_ | − | TTT | 614 | AGTAAAGAAATAGGA | 2620 | AGUAAAGAAAUAGGAA |
| intron1 | | G | | AGACTTATTGGCTCG | | GACUUAUUGGCUCG |
| STMN2_ | − | CTT | 615 | TTGGCTCGAGGCCCTC | 2621 | UUGGCUCGAGGCCCUC |
| intron1 | | A | | AAGTTTAGATTTTT | | AAGUUUAGAUUUUU |
| STMN2_ | − | ATT | 616 | GCTCGAGGCCCTCAA | 2622 | GCUCGAGGCCCUCAAG |
| intron1 | | G | | GTTTAGATTTTTGTC | | UUUAGAUUUUUGUC |
| STMN2_ | − | TTT | 617 | TTTTAATTTCTTCAGT | 2623 | UUUUAAUUUCUUCAGU |
| intron1 | | G | | ATTGCTATTCATAA | | AUUGCUAUUCAUAA |
| STMN2_ | − | TTTT | 618 | GTTTTAATTTCTTCAG | 2624 | GUUUUAAUUUCUUCAG |
| intron1 | | | | TATTGCTATTCATA | | UAUUGCUAUUCAUA |
| STMN2_ | − | CTTT | 619 | TGTTTTAATTTCTTCA | 2625 | UGUUUUAAUUUCUUCA |
| intron1 | | | | GTATTGCTATTCAT | | GUAUUGCUAUUCAU |
| STMN2_ | − | ATT | 620 | AGACAGCAATCTTTTG | 2626 | AGACAGCAAUCUUUUG |
| intron1 | | G | | TTTTAATTTCTTCA | | UUUUAAUUUCUUCA |
| STMN2_ | − | TTT | 621 | GTAAATAATAAATAT | 2627 | GUAAAUAAUAAAUAUA |
| intron1 | | G | | AAGATATATTGAGAC | | AGAUAUAUUGAGAC |
| STMN2_ | − | ATT | 622 | GGTAAATAATAAATA | 2628 | GGUAAAUAAUAAAUAU |
| intron1 | | T | | TAAGATATATTGAGA | | AAGAUAUAUUGAGA |
| STMN2_ | − | CTT | 623 | GAATAATTTGGTAAAT | 2629 | GAAUAAUUUGGUAAAU |
| intron1 | | A | | AATAAATATAAGAT | | AAUAAAUAUAAGAU |
| STMN2_ | − | ATT | 624 | AGGAAGAAATACTCT | 2630 | AGGAAGAAAUACUCUU |
| intron1 | | C | | TAGAATAATTTGGTA | | AGAAUAAUUUGGUA |
| STMN2_ | − | TTTC | 625 | TCACATGGTATTCAGG | 2631 | UCACAUGGUAUUCAGG |
| intron1 | | | | AAGAAATACTCTTA | | AAGAAAUACUCUUA |
| STMN2_ | − | TTTT | 626 | CTCACATGGTATTCAG | 2632 | CUCACAUGGUAUUCAG |
| intron1 | | | | GAAGAAATACTCTT | | GAAGAAAUACUCUU |
| STMN2_ | − | ATT | 627 | TCTCACATGGTATTCA | 2633 | UCUCACAUGGUAUUCA |
| intron1 | | T | | GGAAGAAATACTCT | | GGAAGAAAUACUCU |
| STMN2_ | − | CTT | 628 | AGAATTTTCTCACATG | 2634 | AGAAUUUUCUCACAUG |
| intron1 | | A | | GTATTCAGGAAGAA | | GUAUUCAGGAAGAA |
| STMN2_ | − | ATT | 629 | TTAAGAATTTTCTCAC | 2635 | UUAAGAAUUUUCUCAC |
| intron1 | | C | | ATGGTATTCAGGAA | | AUGGUAUUCAGGAA |
| STMN2_ | − | TTTC | 630 | AAATATACAGTCATA | 2636 | AAAUAUACAGUCAUAC |
| intron1 | | | | CTCAATAAATTCTTA | | UCAAUAAAUUCUUA |
| STMN2_ | − | TTTT | 631 | CAAATATACAGTCAT | 2637 | CAAAUAUACAGUCAUA |
| intron1 | | | | ACTCAATAAATTCTT | | CUCAAUAAAUUCUU |
| STMN2_ | − | CTTT | 632 | TCAAATATACAGTCAT | 2638 | UCAAAUAUACAGUCAU |
| intron1 | | | | ACTCAATAAATTCT | | ACUCAAUAAAUUCU |
| STMN2_ | − | CTT | 633 | GATAAGCAGAAGAAA | 2639 | GAUAAGCAGAAGAAAA |
| intron1 | | A | | ACACTCTTTTCAAAT | | CACUCUUUUCAAAU |
| STMN2_ | − | ATT | 634 | GCTTAGATAAGCAGA | 2640 | GCUUAGAUAAGCAGAA |
| intron1 | | G | | AGAAAACACTCTTTT | | GAAAACACUCUUUU |
| STMN2_ | − | TTT | 635 | TTGGCTTAGATAAGCA | 2641 | UUGGCUUAGAUAAGCA |
| intron1 | | A | | GAAGAAAACACTCT | | GAAGAAAACACUCU |
| STMN2_ | − | CTTT | 636 | ATTGGCTTAGATAAGC | 2642 | AUUGGCUUAGAUAAGC |
| intron1 | | | | AGAAGAAAACACTC | | AGAAGAAAACACUC |
| STMN2_ | − | ATT | 637 | AATAATGAAGATCCTT | 2643 | AAUAAUGAAGAUCCUU |
| intron1 | | G | | TATTGGCTTAGATA | | UAUUGGCUUAGAUA |
| STMN2_ | − | GTT | 638 | GAATTGAATAATGAA | 2644 | GAAUUGAAUAAUGAAG |
| intron1 | | A | | GATCCTTTATTGGCT | | AUCCUUUAUUGGCU |
| STMN2_ | − | CTT | 639 | GAAAGTTAGAATTGA | 2645 | GAAAGUUAGAAUUGAA |
| intron1 | | A | | ATAATGAAGATCCTT | | UAAUGAAGAUCCUU |
| STMN2_ | − | CTT | 640 | CTTAGAAAGTTAGAA | 2646 | CUUAGAAAGUUAGAAU |
| intron1 | | C | | TTGAATAATGAAGAT | | UGAAUAAUGAAGAU |
| STMN2_ | − | GTT | 641 | ACTTCCTTAGAAAGTT | 2647 | ACUUCCUUAGAAAGUU |
| intron1 | | G | | AGAATTGAATAATG | | AGAAUUGAAUAAUG |
| STMN2_ | − | TTTC | 642 | TGATCTGTAGGTTGAC | 2648 | UGAUCUGUAGGUUGAC |
| intron1 | | | | TTCCTTAGAAAGTT | | UUCCUUAGAAAGUU |
| STMN2_ | − | CTTT | 643 | CTGATCTGTAGGTTGA | 2649 | CUGAUCUGUAGGUUGA |
| intron1 | | | | CTTCCTTAGAAAGT | | CUUCCUUAGAAAGU |
| STMN2_ | − | GTT | 644 | TAATTTCTTCAGTATT | 2650 | UAAUUUCUUCAGUAUU |
| intron1 | | T | | GCTATTCATAAATG | | GCUAUUCAUAAAUG |
| STMN2_ | − | TTTT | 645 | AATTTCTTCAGTATTG | 2651 | AAUUUCUUCAGUAUUG |
| intron1 | | | | CTATTCATAAATGA | | CUAUUCAUAAAUGA |
| STMN2_ | − | TTT | 646 | ATTTCTTCAGTATTGC | 2652 | AUUUCUUCAGUAUUGC |
| intron1 | | A | | TATTCATAAATGAT | | UAUUCAUAAAUGAU |
| STMN2_ | − | ATT | 647 | CTTCAGTATTGCTATT | 2653 | CUUCAGUAUUGCUAUU |
| intron1 | | T | | CATAAATGATAGTA | | CAUAAAUGAUAGUA |
| STMN2_ | − | ATT | 648 | AGAGAGAGTGATGGG | 2654 | AGAGAGAGUGAUGGGG |
| intron1 | | A | | GCAGAACACATAATT | | CAGAACACAUAAUU |
| STMN2_ | − | TTT | 649 | AAAATCCAATTAAGA | 2655 | AAAAUCCAAUUAAGAG |
| intron1 | | A | | GAGAGTGATGGGGCA | | AGAGUGAUGGGGCA |
| STMN2_ | − | TTTT | 650 | AAAAATCCAATTAAG | 2656 | AAAAAUCCAAUUAAGA |
| intron1 | | | | AGAGAGTGATGGGGC | | GAGAGUGAUGGGGC |
| STMN2_ | − | ATT | 651 | TAAAAATCCAATTAA | 2657 | UAAAAAUCCAAUUAAG |
| intron1 | | T | | GAGAGAGTGATGGGG | | AGAGAGUGAUGGGG |
| STMN2_ | − | CTT | 652 | TGCCGAGTCCTGCAAT | 2658 | UGCCGAGUCCUGCAAU |
| intron1 | | C | | ATGAATATAATTTT | | AUGAAUAUAAUUUU |
| STMN2_ | − | TTTC | 653 | TCTCGAAGGTCTTCTG | 2659 | UCUCGAAGGUCUUCUG |
| intron1 | | | | CCGAGTCCTGCAAT | | CCGAGUCCUGCAAU |
| STMN2_ | − | CTTT | 654 | CTCTCGAAGGTCTTCT | 2660 | CUCUCGAAGGUCUUCU |
| intron1 | | | | GCCGAGTCCTGCAA | | GCCGAGUCCUGCAA |
| STMN2_ | − | TTTC | 655 | TACCTTTCTCTCGAAG | 2661 | UACCUUUCUCUCGAAG |
| intron1 | | | | GTCTTCTGCCGAGT | | GUCUUCUGCCGAGU |
| STMN2_ | − | TTTT | 656 | CTACCTTTCTCTCGAA | 2662 | CUACCUUUCUCUCGAA |
| intron1 | | | | GGTCTTCTGCCGAG | | GGUCUUCUGCCGAG |
| STMN2_ | − | ATT | 657 | TCTACCTTTCTCTCGA | 2663 | UCUACCUUUCUCUCGA |
| intron1 | | T | | AGGTCTTCTGCCGA | | AGGUCUUCUGCCGA |
| STMN2_ | − | CTT | 658 | TTTTCTACCTTTCTCTC | 2664 | UUUUCUACCUUUCUCU |
| intron1 | | A | | GAAGGTCTTCTGC | | CGAAGGUCUUCUGC |
| STMN2_ | − | ATT | 659 | TTATTTTCTACCTTTCT | 2665 | UUAUUUUCUACCUUUC |
| intron1 | | C | | CTCGAAGGTCTTC | | UCUCGAAGGUCUUC |
| STMN2_ | − | CTT | 660 | GGCAGGCTGTCTGTCT | 2666 | GGCAGGCUGUCUGUCU |
| intron1 | | A | | CTCTCTCTCGCACA | | CUCUCUCUCGCACA |
| STMN2_ | − | CTT | 661 | AAGATCCTCTTTCTGA | 2667 | AAGAUCCUCUUUCUGA |
| intron1 | | G | | TCTGTAGGTTGACT | | UCUGUAGGUUGACU |
| STMN2_ | − | CTT | 662 | TTAGGCAGGCTGTCTG | 2668 | UUAGGCAGGCUGUCUG |
| intron1 | | C | | TCTCTCTCTCTCGC | | UCUCUCUCUCUCGC |
| STMN2_ | − | ATT | 663 | CTTCTTAGGCAGGCTG | 2669 | CUUCUUAGGCAGGCUG |
| intron1 | | T | | TCTGTCTCTCTCTC | | UCUGUCUCUCUCUC |
| STMN2_ | − | ATT | 664 | ATTTCTTCTTAGGCAG | 2670 | AUUUCUUCUUAGGCAG |
| intron1 | | C | | GCTGTCTGTCTCTC | | GCUGUCUGUCUCUC |
| STMN2_ | − | ATT | 665 | ACATTCATTTCTTCTT | 2671 | ACAUUCAUUUCUUCUU |
| intron1 | | C | | AGGCAGGCTGTCTG | | AGGCAGGCUGUCUG |
| STMN2_ | − | CTT | 666 | TCAACTGTGCCACAAG | 2672 | UCAACUGUGCCACAAG |
| intron1 | | G | | CCGCATTCACATTC | | CCGCAUUCACAUUC |
| STMN2_ | − | TTT | 667 | TCATCCTTGTCAACTG | 2673 | UCAUCCUUGUCAACUG |
| intron1 | | A | | TGCCACAAGCCGCA | | UGCCACAAGCCGCA |
| STMN2_ | − | ATT | 668 | ATCATCCTTGTCAACT | 2674 | AUCAUCCUUGUCAACU |
| intron1 | | T | | GTGCCACAAGCCGC | | GUGCCACAAGCCGC |
| STMN2_ | − | ATT | 669 | ATTTATCATCCTTGTC | 2675 | AUUUAUCAUCCUUGUC |
| intron1 | | G | | AACTGTGCCACAAG | | AACUGUGCCACAAG |
| STMN2_ | − | ATT | 670 | TTGATTTATCATCCTT | 2676 | UUGAUUUAUCAUCCUU |
| intron1 | | A | | GTCAACTGTGCCAC | | GUCAACUGUGCCAC |
| STMN2_ | − | CTT | 671 | CATTATTGATTTATCA | 2677 | CAUUAUUGAUUUAUCA |
| intron1 | | G | | TCCTTGTCAACTGT | | UCCUUGUCAACUGU |
| STMN2_ | − | ATT | 672 | ATAAATGATAGTAAG | 2678 | AUAAAUGAUAGUAAGC |
| intron1 | | C | | CTTGCATTATTGATT | | UUGCAUUAUUGAUU |
| STMN2_ | − | ATT | 673 | CTATTCATAAATGATA | 2679 | CUAUUCAUAAAUGAUA |
| intron1 | | G | | GTAAGCTTGCATTA | | GUAAGCUUGCAUUA |
| STMN2_ | − | CTT | 674 | AGTATTGCTATTCATA | 2680 | AGUAUUGCUAUUCAUA |
| intron1 | | C | | AATGATAGTAAGCT | | AAUGAUAGUAAGCU |
| STMN2_ | − | TTTC | 675 | TTCAGTATTGCTATTC | 2681 | UUCAGUAUUGCUAUUC |
| intron1 | | | | ATAAATGATAGTAA | | AUAAAUGAUAGUAA |
| STMN2_ | − | TTTC | 676 | TTCTTAGGCAGGCTGT | 2682 | UUCUUAGGCAGGCUGU |
| intron1 | | | | CTGTCTCTCTCTCT | | CUGUCUCUCUCUCU |
| STMN2_ | − | CTTT | 677 | ACAATCTTTGTAAAAA | 2683 | ACAAUCUUUGUAAAAA |
| intron1 | | | | AAAAAAAATCATTC | | AAAAAAAAUCAUUC |
| STMN2_ | − | ATT | 678 | CTTGAAGATCCTCTTT | 2684 | CUUGAAGAUCCUCUUU |
| intron1 | | C | | CTGATCTGTAGGTT | | CUGAUCUGUAGGUU |
| STMN2_ | − | CTTT | 679 | GATGCTATTCCTTGAA | 2685 | GAUGCUAUUCCUUGAA |
| intron1 | | | | GATCCTCTTTCTGA | | GAUCCUCUUUCUGA |
| STMN2_ | − | CTT | 680 | GTCCAACTTTGTGTTG | 2686 | GUCCAACUUUGUGUUG |
| intron1 | | A | | AGTAACAGTATATT | | AGUAACAGUAUAUU |
| STMN2_ | − | TTT | 681 | AGACTTAGTCCAACTT | 2687 | AGACUUAGUCCAACUU |
| intron1 | | G | | TGTGTTGAGTAACA | | UGUGUUGAGUAACA |
| STMN2_ | − | CTTT | 682 | GAGACTTAGTCCAACT | 2688 | GAGACUUAGUCCAACU |
| intron1 | | | | TTGTGTTGAGTAAC | | UUGUGUUGAGUAAC |
| STMN2_ | − | GTT | 683 | ACAACAACTGAATGG | 2689 | ACAACAACUGAAUGGC |
| intron1 | | A | | CTAACTTTGAGACTT | | UAACUUUGAGACUU |
| STMN2_ | − | CTT | 684 | TGAGAGACCCTGAAA | 2690 | UGAGAGACCCUGAAAU |
| intron1 | | C | | TGAACTGTTAACAAC | | GAACUGUUAACAAC |
| STMN2_ | − | TTTC | 685 | CCAGCTTCTGAGAGAC | 2691 | CCAGCUUCUGAGAGAC |
| intron1 | | | | CCTGAAATGAACTG | | CCUGAAAUGAACUG |
| STMN2_ | − | GTT | 686 | CCCAGCTTCTGAGAGA | 2692 | CCCAGCUUCUGAGAGA |
| intron1 | | T | | CCCTGAAATGAACT | | CCCUGAAAUGAACU |
| STMN2_ | − | ATT | 687 | CAAAAATGGAAAGTT | 2693 | CAAAAAUGGAAAGUUU |
| intron1 | | G | | TCCCAGCTTCTGAGA | | CCCAGCUUCUGAGA |
| STMN2_ | − | CTT | 688 | AATGTACAAGAAATT | 2694 | AAUGUACAAGAAAUUG |
| intron1 | | C | | GCAAAAATGGAAAGT | | CAAAAAUGGAAAGU |
| STMN2_ | − | TTTC | 689 | CTTCAATGTACAAGA | 2695 | CUUCAAUGUACAAGAA |
| intron1 | | | | AATTGCAAAAATGGA | | AUUGCAAAAAUGGA |
| STMN2_ | − | CTTT | 690 | CCTTCAATGTACAAGA | 2696 | CCUUCAAUGUACAAGA |
| intron1 | | | | AATTGCAAAAATGG | | AAUUGCAAAAAUGG |
| STMN2_ | − | CTT | 691 | CTTTCCTTCAATGTAC | 2697 | CUUUCCUUCAAUGUAC |
| intron1 | | C | | AAGAAATTGCAAAA | | AAGAAAUUGCAAAA |
| STMN2_ | − | CTT | 692 | AGTGTGTCTTCCTTTC | 2698 | AGUGUGUCUUCCUUUC |
| intron1 | | A | | CTTCAATGTACAAG | | CUUCAAUGUACAAG |
| STMN2_ | − | TTT | 693 | TAATGCTGTCTTAAGT | 2699 | UAAUGCUGUCUUAAGU |
| intron1 | | G | | GTGTCTTCCTTTCC | | GUGUCUUCCUUUCC |
| STMN2_ | − | TTTT | 694 | GTAATGCTGTCTTAAG | 2700 | GUAAUGCUGUCUUAAG |
| intron1 | | | | TGTGTCTTCCTTTC | | UGUGUCUUCCUUUC |
| STMN2_ | − | CTTT | 695 | TGTAATGCTGTCTTAA | 2701 | UGUAAUGCUGUCUUAA |
| intron1 | | | | GTGTGTCTTCCTTT | | GUGUGUCUUCCUUU |
| STMN2_ | − | ATT | 696 | CTTTTGTAATGCTGTC | 2702 | CUUUUGUAAUGCUGUC |
| intron1 | | A | | TTAAGTGTGTCTTC | | UUAAGUGUGUCUUC |
| STMN2_ | − | TTT | 697 | AAACATGAATTACTTT | 2703 | AAACAUGAAUUACUUU |
| intron1 | | A | | TGTAATGCTGTCTT | | UGUAAUGCUGUCUU |
| STMN2_ | − | ATT | 698 | AAAACATGAATTACTT | 2704 | AAAACAUGAAUUACUU |
| intron1 | | T | | TTGTAATGCTGTCT | | UUGUAAUGCUGUCU |
| STMN2_ | − | ATT | 699 | AACATTTAAAACATG | 2705 | AACAUUUAAAACAUGA |
| intron1 | | A | | AATTACTTTTGTAAT | | AUUACUUUUGUAAU |
| STMN2_ | − | GTT | 700 | TACAGAGAGCCCTGC | 2706 | UACAGAGAGCCCUGCC |
| intron1 | | A | | CCGACTGCCAGAATT | | CGACUGCCAGAAUU |
| STMN2_ | − | TTT | 701 | TCATCTCCAAATGAGG | 2707 | UCAUCUCCAAAUGAGG |
| intron1 | | G | | TTATACAGAGAGCC | | UUAUACAGAGAGCC |
| STMN2_ | − | TTTT | 702 | GTCATCTCCAAATGAG | 2708 | GUCAUCUCCAAAUGAG |
| intron1 | | | | GTTATACAGAGAGC | | GUUAUACAGAGAGC |
| STMN2_ | − | TTTT | 703 | TGTCATCTCCAAATGA | 2709 | UGUCAUCUCCAAAUGA |
| intron1 | | | | GGTTATACAGAGAG | | GGUUAUACAGAGAG |
| STMN2_ | − | ATT | 704 | TTGTCATCTCCAAATG | 2710 | UUGUCAUCUCCAAAUG |
| intron1 | | T | | AGGTTATACAGAGA | | AGGUUAUACAGAGA |
| STMN2_ | − | TTT | 705 | GATTTTTGTCATCTCC | 2711 | GAUUUUUGUCAUCUCC |
| intron1 | | A | | AAATGAGGTTATAC | | AAAUGAGGUUAUAC |
| STMN2_ | − | GTT | 706 | AGATTTTTGTCATCTC | 2712 | AGAUUUUUGUCAUCUC |
| intron1 | | T | | CAAATGAGGTTATA | | CAAAUGAGGUUAUA |
| STMN2_ | − | CTTT | 707 | GTGTTGAGTAACAGT | 2713 | GUGUUGAGUAACAGUA |
| intron1 | | | | ATATTCTGCAAACCC | | UAUUCUGCAAACCC |
| STMN2_ | − | TTT | 708 | TGTTGAGTAACAGTAT | 2714 | UGUUGAGUAACAGUAU |
| intron1 | | G | | ATTCTGCAAACCCT | | AUUCUGCAAACCCU |
| STMN2_ | − | GTT | 709 | AGTAACAGTATATTCT | 2715 | AGUAACAGUAUAUUCU |
| intron1 | | G | | GCAAACCCTGAAGC | | GCAAACCCUGAAGC |
| STMN2_ | − | ATT | 710 | TGCAAACCCTGAAGCT | 2716 | UGCAAACCCUGAAGCU |
| intron1 | | C | | AGTTTTATTTGGGA | | AGUUUUAUUUGGGA |
| STMN2_ | − | TTTC | 711 | CAGAAAGGTGGTAAT | 2717 | CAGAAAGGUGGUAAUG |
| intron1 | | | | GGCTGCATGGTCAGC | | GCUGCAUGGUCAGC |
| STMN2_ | − | ATT | 712 | CCAGAAAGGTGGTAA | 2718 | CCAGAAAGGUGGUAAU |
| intron1 | | T | | TGGCTGCATGGTCAG | | GGCUGCAUGGUCAG |
| STMN2_ | − | TTT | 713 | CAGCATAATATTTCCA | 2719 | CAGCAUAAUAUUUCCA |
| intron1 | | G | | GAAAGGTGGTAATG | | GAAAGGUGGUAAUG |
| STMN2_ | − | TTTT | 714 | GCAGCATAATATTTCC | 2720 | GCAGCAUAAUAUUUCC |
| intron1 | | | | AGAAAGGTGGTAAT | | AGAAAGGUGGUAAU |
| STMN2_ | − | TTTT | 715 | TGCAGCATAATATTTC | 2721 | UGCAGCAUAAUAUUUC |
| intron1 | | | | CAGAAAGGTGGTAA | | CAGAAAGGUGGUAA |
| STMN2_ | − | ATT | 716 | TTGCAGCATAATATTT | 2722 | UUGCAGCAUAAUAUUU |
| intron1 | | T | | CCAGAAAGGTGGTA | | CCAGAAAGGUGGUA |
| STMN2_ | − | ATT | 717 | TATCATTTTTGCAGCA | 2723 | UAUCAUUUUUGCAGCA |
| intron1 | | G | | TAATATTTCCAGAA | | UAAUAUUUCCAGAA |
| STMN2_ | − | TTTC | 718 | GTGTATTGTATCATTT | 2724 | GUGUAUUGUAUCAUUU |
| intron1 | | | | TTGCAGCATAATAT | | UUGCAGCAUAAUAU |
| STMN2_ | − | ATT | 719 | CGTGTATTGTATCATT | 2725 | CGUGUAUUGUAUCAUU |
| intron1 | | T | | TTTGCAGCATAATA | | UUUGCAGCAUAAUA |
| STMN2_ | − | TTT | 720 | AGATATTTCGTGTATT | 2726 | AGAUAUUUCGUGUAUU |
| intron1 | | G | | GTATCATTTTTGCA | | GUAUCAUUUUUGCA |
| STMN2_ | − | ATT | 721 | GAGATATTTCGTGTAT | 2727 | GAGAUAUUUCGUGUAU |
| intron1 | | T | | TGTATCATTTTTGC | | UGUAUCAUUUUUGC |
| STMN2_ | − | TTT | 722 | ATTTGAGATATTTCGT | 2728 | AUUUGAGAUAUUUCGU |
| intron1 | | A | | GTATTGTATCATTT | | GUAUUGUAUCAUUU |
| STMN2_ | − | TTTT | 723 | AATTTGAGATATTTCG | 2729 | AAUUUGAGAUAUUUCG |
| intron1 | | | | TGTATTGTATCATT | | UGUAUUGUAUCAUU |
| STMN2_ | − | TTT | 724 | ATGCTATTCCTTGAAG | 2730 | AUGCUAUUCCUUGAAG |
| intron1 | | G | | ATCCTCTTTCTGAT | | AUCCUCUUUCUGAU |
| STMN2_ | − | TTTT | 725 | TAATTTGAGATATTTC | 2731 | UAAUUUGAGAUAUUUC |
| intron1 | | | | GTGTATTGTATCAT | | GUGUAUUGUAUCAU |
| STMN2_ | − | ATT | 726 | TTTAATTTGAGATATT | 2732 | UUUAAUUUGAGAUAUU |
| intron1 | | T | | TCGTGTATTGTATC | | UCGUGUAUUGUAUC |
| STMN2_ | − | GTT | 727 | TATTTTTTAATTTGAG | 2733 | UAUUUUUUAAUUUGAG |
| intron1 | | A | | ATATTTCGTGTATT | | AUAUUUCGUGUAUU |
| STMN2_ | − | TTT | 728 | GGAAATGTTATATTTT | 2734 | GGAAAUGUUAUAUUUU |
| intron1 | | G | | TTAATTTGAGATAT | | UUAAUUUGAGAUAU |
| STMN2_ | − | ATT | 729 | GGGAAATGTTATATTT | 2735 | GGGAAAUGUUAUAUUU |
| intron1 | | T | | TTTAATTTGAGATA | | UUUAAUUUGAGAUA |
| STMN2_ | − | TTT | 730 | GTGCCCTATTTGGGAA | 2736 | GUGCCCUAUUUGGGAA |
| intron1 | | A | | ATGTTATATTTTTT | | AUGUUAUAUUUUUU |
| STMN2_ | − | TTTT | 731 | AGTGCCCTATTTGGGA | 2737 | AGUGCCCUAUUUGGGA |
| intron1 | | | | AATGTTATATTTTT | | AAUGUUAUAUUUUU |
| STMN2_ | − | TTTT | 732 | TAGTGCCCTATTTGGG | 2738 | UAGUGCCCUAUUUGGG |
| intron1 | | | | AAATGTTATATTTT | | AAAUGUUAUAUUUU |
| STMN2_ | − | GTT | 733 | TTAGTGCCCTATTTGG | 2739 | UUAGUGCCCUAUUUGG |
| intron1 | | T | | GAAATGTTATATTT | | GAAAUGUUAUAUUU |
| STMN2_ | − | TTT | 734 | GGATCATGTTTTTAGT | 2740 | GGAUCAUGUUUUUAGU |
| intron1 | | G | | GCCCTATTTGGGAA | | GCCCUAUUUGGGAA |
| STMN2_ | − | ATT | 735 | GGGATCATGTTTTTAG | 2741 | GGGAUCAUGUUUUUAG |
| intron1 | | T | | TGCCCTATTTGGGA | | UGCCCUAUUUGGGA |
| STMN2_ | − | TTT | 736 | TTTGGGATCATGTTTT | 2742 | UUUGGGAUCAUGUUUU |
| intron1 | | A | | TAGTGCCCTATTTG | | UAGUGCCCUAUUUG |
| STMN2_ | − | TTTT | 737 | ATTTGGGATCATGTTT | 2743 | AUUUGGGAUCAUGUUU |
| intron1 | | | | TTAGTGCCCTATTT | | UUAGUGCCCUAUUU |
| STMN2_ | − | GTT | 738 | TATTTGGGATCATGTT | 2744 | UAUUUGGGAUCAUGUU |
| intron1 | | T | | TTTAGTGCCCTATT | | UUUAGUGCCCUAUU |
| STMN2_ | − | TTTT | 739 | TTAATTTGAGATATTT | 2745 | UUAAUUUGAGAUAUUU |
| intron1 | | | | CGTGTATTGTATCA | | CGUGUAUUGUAUCA |
| STMN2_ | − | ATT | 740 | CCAGAGTAATAAAAT | 2746 | CCAGAGUAAUAAAAUC |
| intron1 | | C | | CCCCAGGTATATGAG | | CCCAGGUAUAUGAG |
| STMN2_ | − | GTT | 741 | CTTTACAATCTTTGTA | 2747 | CUUUACAAUCUUUGUA |
| intron1 | | G | | AAAAAAAAAAAATC | | AAAAAAAAAAAAUC |
| STMN2_ | − | ATT | 742 | CAGAAGAATAACTGC | 2748 | CAGAAGAAUAACUGCU |
| intron1 | | C | | TAAATGGGCACTCTT | | AAAUGGGCACUCUU |
| STMN2_ | − | TTTT | 743 | TATTTTTGTTCTCATA | 2749 | UAUUUUUGUUCUCAUA |
| intron1 | | | | ATACCTGGCACAGG | | AUACCUGGCACAGG |
| STMN2_ | − | ATT | 744 | TTATTTTTGTTCTCAT | 2750 | UUAUUUUUGUUCUCAU |
| intron1 | | T | | AATACCTGGCACAG | | AAUACCUGGCACAG |
| STMN2_ | − | TTTC | 745 | TGCAAAAGACTAAAT | 2751 | UGCAAAAGACUAAAUC |
| intron1 | | | | CCACCAAGGGTGAGG | | CACCAAGGGUGAGG |
| STMN2_ | − | TTTT | 746 | CTGCAAAAGACTAAA | 2752 | CUGCAAAAGACUAAAU |
| intron1 | | | | TCCACCAAGGGTGAG | | CCACCAAGGGUGAG |
| STMN2_ | − | TTTT | 747 | TCTGCAAAAGACTAA | 2753 | UCUGCAAAAGACUAAA |
| intron1 | | | | ATCCACCAAGGGTGA | | UCCACCAAGGGUGA |
| STMN2_ | − | TTTT | 748 | TTCTGCAAAAGACTA | 2754 | UUCUGCAAAAGACUAA |
| intron1 | | | | AATCCACCAAGGGTG | | AUCCACCAAGGGUG |
| STMN2_ | − | TTTT | 749 | TTTCTGCAAAAGACTA | 2755 | UUUCUGCAAAAGACUA |
| intron1 | | | | AATCCACCAAGGGT | | AAUCCACCAAGGGU |
| STMN2_ | − | CTTT | 750 | TTTTCTGCAAAAGACT | 2756 | UUUUCUGCAAAAGACU |
| intron1 | | | | AAATCCACCAAGGG | | AAAUCCACCAAGGG |
| STMN2_ | − | TTTC | 751 | TGACATGTACAGGAT | 2757 | UGACAUGUACAGGAUC |
| intron1 | | | | CTTTTTTTCTGGAAA | | UUUUUUUCUGCAAA |
| STMN2_ | − | CTTT | 752 | CTGACATGTACAGGA | 2758 | CUGACAUGUACAGGAU |
| intron1 | | | | TCTTTTTTTCTGCAA | | CUUUUUUUCUGCAA |
| STMN2_ | − | ATT | 753 | AACTTTCTGACATGTA | 2759 | AACUUUCUGACAUGUA |
| intron1 | | G | | CAGGATCTTTTTTT | | CAGGAUCUUUUUUU |
| STMN2_ | − | ATT | 754 | CTATTGAACTTTCTGA | 2760 | CUAUUGAACUUUCUGA |
| intron1 | | A | | CATGTACAGGATCT | | CAUGUACAGGAUCU |
| STMN2_ | − | ATT | 755 | TTACTATTGAACTTTC | 2761 | UUACUAUUGAACUUUC |
| intron1 | | A | | TGACATGTACAGGA | | UGACAUGUACAGGA |
| STMN2_ | − | ATT | 756 | CCATTATTACTATTGA | 2762 | CCAUUAUUACUAUUGA |
| intron1 | | A | | ACTTTCTGACATGT | | ACUUUCUGACAUGU |
| STMN2_ | − | GTT | 757 | TAAATTACCATTATTA | 2763 | UAAAUUACCAUUAUUA |
| intron1 | | A | | CTATTGAACTTTCT | | CUAUUGAACUUUCU |
| STMN2_ | − | TTT | 758 | TAGTTATAAATTACCA | 2764 | UAGUUAUAAAUUACCA |
| intron1 | | A | | TTATTACTATTGAA | | UUAUUACUAUUGAA |
| STMN2_ | − | ATT | 759 | ATAGTTATAAATTACC | 2765 | AUAGUUAUAAAUUACC |
| intron1 | | T | | ATTATTACTATTGA | | AUUAUUACUAUUGA |
| STMN2_ | − | CTT | 760 | CATTTATAGTTATAAA | 2766 | CAUUUAUAGUUAUAAA |
| intron1 | | C | | TTACCATTATTACT | | UUACCAUUAUUACU |
| STMN2_ | − | ATT | 761 | TGAGATGGTGACTTCC | 2767 | UGAGAUGGUGACUUCC |
| intron1 | | G | | ATTTATAGTTATAA | | AUUUAUAGUUAUAA |
| STMN2_ | − | GTT | 762 | AGATGGTGAAATTGT | 2768 | AGAUGGUGAAAUUGUG |
| intron1 | | A | | GAGATGGTGACTTCC | | AGAUGGUGACUUCC |
| STMN2_ | − | ATT | 763 | TTAAGATGGTGAAATT | 2769 | UUAAGAUGGUGAAAUU |
| intron1 | | G | | GTGAGATGGTGACT | | GUGAGAUGGUGACU |
| STMN2_ | − | TTT | 764 | ACAAAATTGTTAAGA | 2770 | ACAAAAUUGUUAAGAU |
| intron1 | | A | | TGGTGAAATTGTGAG | | GGUGAAAUUGUGAG |
| STMN2_ | − | GTT | 765 | AACAAAATTGTTAAG | 2771 | AACAAAAUUGUUAAGA |
| intron1 | | T | | ATGGTGAAATTGTGA | | UGGUGAAAUUGUGA |
| STMN2_ | − | ATT | 766 | TAGGGCAGTTTAACA | 2772 | UAGGGCAGUUUAACAA |
| intron1 | | G | | AAATTGTTAAGATGG | | AAUUGUUAAGAUGG |
| STMN2_ | − | CTT | 767 | TAATATTGTAGGGCA | 2773 | UAAUAUUGUAGGGCAG |
| intron1 | | G | | GTTTAACAAAATTGT | | UUUAACAAAAUUGU |
| STMN2_ | − | ATT | 768 | TGTACTATCTTGTAAT | 2774 | UGUACUAUCUUGUAAU |
| intron1 | | A | | ATTGTAGGGCAGTT | | AUUGUAGGGCAGUU |
| STMN2_ | − | GTT | 769 | CTAGTGTATCATTATG | 2775 | CUAGUGUAUCAUUAUG |
| intron1 | | A | | TACTATCTTGTAAT | | UACUAUCUUGUAAU |
| STMN2_ | − | TTTT | 770 | ATTTTTGTTGTGATAA | 2116 | AUUUUUGUUCUCAUAA |
| intron1 | | | | TACCTGGCACAGGC | | UACCUGGCACAGGC |
| STMN2_ | − | GTT | 771 | ATGTTACTAGTGTATC | 2777 | AUGUUACUAGUGUAUC |
| intron1 | | G | | ATTATGTACTATCT | | AUUAUGUACUAUCU |
| STMN2_ | − | TTT | 772 | TTTTTGTTCTCATAAT | 2778 | UUUUUGUUCUCAUAAU |
| intron1 | | A | | ACCTGGCACAGGCT | | ACCUGGCACAGGCU |
| STMN2_ | − | TTTT | 773 | TGTTCTCATAATACCT | Til9 | UGUUCUCAUAAUACCU |
| intron1 | | | | GGCACAGGCTTCAG | | GGCACAGGCUUCAG |
| STMN2_ | − | TTTT | 774 | GATAGGTAAATAATA | 2780 | GAUAGGUAAAUAAUAU |
| intron1 | | | | TACACAACTTTATTA | | ACACAACUUUAUUA |
| STMN2_ | − | ATT | 775 | TGATAGGTAAATAAT | 2781 | UGAUAGGUAAAUAAUA |
| intron1 | | T | | ATACACAACTTTATT | | UACACAACUUUAUU |
| STMN2_ | − | ATT | 776 | CATATAAATATTTTGA | 2782 | CAUAUAAAUAUUUUGA |
| intron1 | | A | | TAGGTAAATAATAT | | UAGGUAAAUAAUAU |
| STMN2_ | − | TTT | 777 | TATATTACATATAAAT | 2783 | UAUAUUACAUAUAAAU |
| intron1 | | A | | ATTTTGATAGGTAA | | AUUUUGAUAGGUAA |
| STMN2_ | − | ATT | 778 | ATATATTACATATAAA | 2784 | AUAUAUUACAUAUAAA |
| intron1 | | T | | TATTTTGATAGGTA | | UAUUUUGAUAGGUA |
| STMN2_ | − | TTT | 779 | CATGAATGTGTATATA | 2785 | CAUGAAUGUGUAUAUA |
| intron1 | | G | | TGTATGAAATAGGC | | UGUAUGAAAUAGGC |
| STMN2_ | − | TTTT | 780 | GCATGAATGTGTATAT | 2786 | GCAUGAAUGUGUAUAU |
| intron1 | | | | ATGTATGAAATAGG | | AUGUAUGAAAUAGG |
| STMN2_ | − | ATT | 781 | TGCATGAATGTGTATA | 2787 | UGCAUGAAUGUGUAUA |
| intron1 | | T | | TATGTATGAAATAG | | UAUGUAUGAAAUAG |
| STMN2_ | − | CTT | 782 | TTTTGCATGAATGTGT | 2788 | UUUUGCAUGAAUGUGU |
| intron1 | | A | | ATATATGTATGAAA | | AUAUAUGUAUGAAA |
| STMN2_ | − | ATT | 783 | CAGGACAGTGGAGGG | 2789 | CAGGACAGUGGAGGGA |
| intron1 | | A | | AGTGCTAAACCTTAT | | GUGCUAAACCUUAU |
| STMN2_ | − | TTT | 784 | TTACAGGACAGTGGA | 2790 | UUACAGGACAGUGGAG |
| intron1 | | A | | GGGAGTGCTAAACCT | | GGAGUGCUAAACCU |
| STMN2_ | − | TTTT | 785 | ATTACAGGACAGTGG | 2791 | AUUACAGGACAGUGGA |
| intron1 | | | | AGGGAGTGCTAAACC | | GGGAGUGCUAAACC |
| STMN2_ | − | GTT | 786 | TATTACAGGACAGTG | 2792 | UAUUACAGGACAGUGG |
| intron1 | | T | | GAGGGAGTGCTAAAC | | AGGGAGUGCUAAAC |
| STMN2_ | − | ATT | 787 | TCACTGTGCATGTTTT | 2793 | UCACUGUGCAUGUUUU |
| intron1 | | C | | ATTACAGGACAGTG | | AUUACAGGACAGUG |
| STMN2_ | − | TTT | 788 | AACTGAAGACAAATA | 2794 | AACUGAAGACAAAUAU |
| intron1 | | A | | TGCCTCGTGTATGAC | | GCCUCGUGUAUGAC |
| STMN2_ | − | CTTT | 789 | AAACTGAAGACAAAT | 2795 | AAACUGAAGACAAAUA |
| intron1 | | | | ATGCCTCGTGTATGA | | UGCCUCGUGUAUGA |
| STMN2_ | − | GTT | 790 | GTGACACTGACTATCA | 2796 | GUGACACUGACUAUCA |
| intron1 | | A | | ATGACTTTAAACTG | | AUGACUUUAAACUG |
| STMN2_ | − | TTT | 791 | GTTAGTGACACTGACT | 2797 | GUUAGUGACACUGACU |
| intron1 | | A | | ATCAATGACTTTAA | | AUCAAUGACUUUAA |
| STMN2_ | − | CTTT | 792 | AGTTAGTGACACTGA | 2798 | AGUUAGUGACACUGAC |
| intron1 | | | | CTATCAATGACTTTA | | UAUCAAUGACUUUA |
| STMN2_ | − | TTT | 793 | CTTTAGTTAGTGACAC | 2799 | CUUUAGUUAGUGACAC |
| intron1 | | A | | TGACTATCAATGAC | | UGACUAUCAAUGAC |
| STMN2_ | − | TTTT | 794 | ACTTTAGTTAGTGACA | 2800 | ACUUUAGUUAGUGACA |
| intron1 | | | | CTGACTATCAATGA | | CUGACUAUCAAUGA |
| STMN2_ | − | ATT | 795 | TACTTTAGTTAGTGAC | 2801 | UACUUUAGUUAGUGAC |
| intron1 | | T | | ACTGACTATCAATG | | ACUGACUAUCAAUG |
| STMN2_ | − | GTT | 796 | GTGCTCCAATCTATTT | 2802 | GUGCUCCAAUCUAUUU |
| intron1 | | G | | TACTTTAGTTAGTG | | UACUUUAGUUAGUG |
| STMN2_ | − | CTT | 797 | AGAACAAAGTTGGTG | 2803 | AGAACAAAGUUGGUGC |
| intron1 | | C | | CTCCAATCTATTTTA | | UCCAAUCUAUUUUA |
| STMN2_ | − | GTT | 798 | TCATAATACCTGGCAC | 2804 | UCAUAAUACCUGGCAC |
| intron1 | | C | | AGGCTTCAGAACAA | | AGGCUUCAGAACAA |
| STMN2_ | − | TTT | 799 | TTCTCATAATACCTGG | 2805 | UUCUCAUAAUACCUGG |
| intron1 | | G | | CACAGGCTTCAGAA | | CACAGGCUUCAGAA |
| STMN2_ | − | TTTT | 800 | GTTCTCATAATACCTG | 2806 | GUUCUCAUAAUACCUG |
| intron1 | | | | GCACAGGCTTCAGA | | GCACAGGCUUCAGA |
| STMN2_ | − | ATT | 801 | TTGTTCTCATAATACC | 2807 | UUGUUCUCAUAAUACC |
| intron1 | | T | | TGGCACAGGCTTCA | | UGGCACAGGCUUCA |
| STMN2_ | − | CTT | 802 | CTAGTTGATGTTACTA | 2808 | CUAGUUGAUGUUACUA |
| intron1 | | C | | GTGTATCATTATGT | | GUGUAUCAUUAUGU |
| STMN2_ | − | CTT | 803 | GTACTTCCTAGTTGAT | 2809 | GUACUUCCUAGUUGAU |
| intron1 | | G | | GTTACTAGTGTATC | | GUUACUAGUGUAUC |
| STMN2_ | − | TTT | 804 | GTGGATCTTGGTACTT | 2810 | GUGGAUCUUGGUACUU |
| intron1 | | G | | CCTAGTTGATGTTA | | CCUAGUUGAUGUUA |
| STMN2_ | + | TTTT | 805 | ACTGAGAATCAGCAG | 2811 | ACUGAGAAUCAGCAGC |
| intron1 | | | | CGTTTGAGGAGCTAG | | GUUUGAGGAGCUAG |
| STMN2_ | + | ATT | 806 | TACTGAGAATCAGCA | 2812 | UACUGAGAAUCAGCAG |
| intron1 | | T | | GCGTTTGAGGAGCTA | | CGUUUGAGGAGCUA |
| STMN2_ | + | CTT | 807 | CCAAATTTTACTGAGA | 2813 | CCAAAUUUUACUGAGA |
| intron1 | | C | | ATCAGCAGCGTTTG | | AUCAGCAGCGUUUG |
| STMN2_ | + | ATT | 808 | AAATGCTTCCCAAATT | 2814 | AAAUGCUUCCCAAAUU |
| intron1 | | A | | TTACTGAGAATCAG | | UUACUGAGAAUCAG |
| STMN2_ | + | TTT | 809 | ATTAAAATGCTTCCCA | 2815 | AUUAAAAUGCUUCCCA |
| intron1 | | A | | AATTTTACTGAGAA | | AAUUUUACUGAGAA |
| STMN2_ | + | CTTT | 810 | AATTAAAATGCTTCCC | 2816 | AAUUAAAAUGCUUCCC |
| intron1 | | | | AAATTTTACTGAGA | | AAAUUUUACUGAGA |
| STMN2_ | + | ATT | 811 | TTTAATTAAAATGCTT | 2817 | UUUAAUUAAAAUGCUU |
| intron1 | | C | | CCCAAATTTTACTG | | CCCAAAUUUUACUG |
| STMN2_ | + | TTT | 812 | ATGAGTCCATCAACCA | 2818 | AUGAGUCCAUCAACCA |
| intron1 | | A | | ATCTGGCCAGAGAA | | AUCUGGCCAGAGAA |
| STMN2_ | + | ATT | 813 | AATGAGTCCATCAACC | 2819 | AAUGAGUCCAUCAACC |
| intron1 | | T | | AATCTGGCCAGAGA | | AAUCUGGCCAGAGA |
| STMN2_ | + | TTT | 814 | AATATTTAATGAGTCC | 2820 | AAUAUUUAAUGAGUCC |
| intron1 | | A | | ATCAACCAATCTGG | | AUCAACCAAUCUGG |
| STMN2_ | + | ATT | 815 | AAATATTTAATGAGTC | 2821 | AAAUAUUUAAUGAGUC |
| intron1 | | T | | CATCAACCAATCTG | | CAUCAACCAAUCUG |
| STMN2_ | + | ATT | 816 | CAAGATAGTACATAA | 2822 | CAAGAUAGUACAUAAU |
| intron1 | | A | | TGATACACTAGTAAC | | GAUACACUAGUAAC |
| STMN2_ | + | GTT | 817 | AACTGCCCTACAATAT | 2823 | AACUGCCCUACAAUAU |
| intron1 | | A | | TACAAGATAGTACA | | UACAAGAUAGUACA |
| STMN2_ | + | TTT | 818 | TTAAACTGCCCTACAA | 2824 | UUAAACUGCCCUACAA |
| intron1 | | G | | TATTACAAGATAGT | | UAUUACAAGAUAGU |
| STMN2_ | + | TTTT | 819 | GTTAAACTGCCCTACA | 2825 | GUUAAACUGCCCUACA |
| intron1 | | | | ATATTACAAGATAG | | AUAUUACAAGAUAG |
| STMN2_ | + | ATT | 820 | TGTTAAACTGCCCTAC | 2826 | UGUUAAACUGCCCUAC |
| intron1 | | T | | AATATTACAAGATA | | AAUAUUACAAGAUA |
| STMN2_ | + | CTT | 821 | ACAATTTTGTTAAACT | 2827 | ACAAUUUUGUUAAACU |
| intron1 | | A | | GCCCTACAATATTA | | GCCCUACAAUAUUA |
| STMN2_ | + | TTTC | 822 | ACCATCTTAACAATTT | 2828 | ACCAUCUUAACAAUUU |
| intron1 | | | | TGTTAAACTGCCCT | | UGUUAAACUGCCCU |
| STMN2_ | + | ATT | 823 | CACCATCTTAACAATT | 2829 | CACCAUCUUAACAAUU |
| intron1 | | T | | TTGTTAAACTGCCC | | UUGUUAAACUGCCC |
| STMN2_ | + | TTT | 824 | TAACTATAAATGGAA | 2830 | UAACUAUAAAUGGAAG |
| intron1 | | A | | GTCACCATCTCACAA | | UCACCAUCUCACAA |
| STMN2_ | + | ATT | 825 | ATAACTATAAATGGA | 2831 | AUAACUAUAAAUGGAA |
| intron1 | | T | | AGTCACCATCTCACA | | GUCACCAUCUCACA |
| STMN2_ | + | GTT | 826 | AATAGTAATAATGGT | 2832 | AAUAGUAAUAAUGGUA |
| intron1 | | C | | AATTTATAACTATAA | | AUUUAUAACUAUAA |
| STMN2_ | + | TTT | 827 | CAGAAAAAAAGATCC | 2833 | CAGAAAAAAAGAUCCU |
| intron1 | | G | | TGTACATGTCAGAAA | | GUACAUGUCAGAAA |
| STMN2_ | + | TTTT | 828 | GCAGAAAAAAAGATC | 2834 | GCAGAAAAAAAGAUCC |
| intron1 | | | | CTGTACATGTCAGAA | | UGUACAUGUCAGAA |
| STMN2_ | + | CTTT | 829 | TGCAGAAAAAAAGAT | 2835 | UGCAGAAAAAAAGAUC |
| intron1 | | | | CCTGTACATGTCAGA | | CUGUACAUGUCAGA |
| STMN2_ | + | TTT | 830 | GTCTTTTGCAGAAAAA | 2836 | GUCUUUUGCAGAAAAA |
| intron1 | | A | | AAGATCCTGTACAT | | AAGAUCCUGUACAU |
| STMN2_ | + | ATT | 831 | AGTCTTTTGCAGAAAA | 2837 | AGUCUUUUGCAGAAAA |
| intron1 | | T | | AAAGATCCTGTACA | | AAAGAUCCUGUACA |
| STMN2_ | + | TTT | 832 | CTGAGAATCAGCAGC | 2838 | CUGAGAAUCAGCAGCG |
| intron1 | | A | | GTTTGAGGAGCTAGC | | UUUGAGGAGCUAGC |
| STMN2_ | + | GTT | 833 | GAGGAGCTAGCCTCC | 2839 | GAGGAGCUAGCCUCCA |
| intron1 | | T | | ACCCCCAGAGGTTCT | | CCCCCAGAGGUUCU |
| STMN2_ | + | TTT | 834 | AGGAGCTAGCCTCCA | 2840 | AGGAGCUAGCCUCCAC |
| intron1 | | G | | CCCCCAGAGGTTCTC | | CCCCAGAGGUUCUC |
| STMN2_ | + | GTT | 835 | TCACTCTATTAGGTCT | 2841 | UCACUCUAUUAGGUCU |
| intron1 | | C | | GAAGCAGGTCCCAT | | GAAGCAGGUCCCAU |
| STMN2_ | − | TTTT | 836 | GGTGGATCTTGGTACT | 2842 | GGUGGAUCUUGGUACU |
| intron1 | | | | TCCTAGTTGATGTT | | UCCUAGUUGAUGUU |
| STMN2_ | − | CTTT | 837 | TGGTGGATCTTGGTAC | 2843 | UGGUGGAUCUUGGUAC |
| intron1 | | | | TTCCTAGTTGATGT | | UUCCUAGUUGAUGU |
| STMN2_ | − | TTTC | 838 | AGCCTTTTGGTGGATC | 2844 | AGCCUUUUGGUGGAUC |
| intron1 | | | | TTGGTACTTCCTAG | | UUGGUACUUCCUAG |
| STMN2_ | − | TTTT | 839 | CAGCCTTTTGGTGGAT | 2845 | CAGCCUUUUGGUGGAU |
| intron1 | | | | CTTGGTACTTCCTA | | CUUGGUACUUCCUA |
| STMN2_ | − | TTTT | 840 | TCAGCCTTTTGGTGGA | 2846 | UCAGCCUUUUGGUGGA |
| intron1 | | | | TCTTGGTACTTCCT | | UCUUGGUACUUCCU |
| STMN2_ | − | ATT | 841 | TTCAGCCTTTTGGTGG | 2847 | UUCAGCCUUUUGGUGG |
| intron1 | | T | | ATCTTGGTACTTCC | | AUCUUGGUACUUCC |
| STMN2_ | − | TTT | 842 | AATTTTTGAGGGTTTT | 2848 | AAUUUUUCAGCCUUUU |
| intron1 | | A | | GGTGGATCTTGGTA | | GGUGGAUCUUGGUA |
| STMN2_ | − | ATT | 843 | AAATTTTTGAGGGTTT | 2849 | AAAUUUUUCAGCCUUU |
| intron1 | | T | | TGGTGGATCTTGGT | | UGGUGGAUCUUGGU |
| STMN2_ | − | ATT | 844 | AATATTTAAATTTTTC | 2850 | AAUAUUUAAAUUUUUC |
| intron1 | | A | | AGCCTTTTGGTGGA | | AGCCUUUUGGUGGA |
| STMN2_ | − | GTT | 845 | ATGGACTCATTAAATA | 2851 | AUGGACUCAUUAAAUA |
| intron1 | | G | | TTTAAATTTTTCAG | | UUUAAAUUUUUCAG |
| STMN2_ | − | ATT | 846 | GTTGATGGACTCATTA | 2852 | GUUGAUGGACUCAUUA |
| intron1 | | G | | AATATTTAAATTTT | | AAUAUUUAAAUUUU |
| STMN2_ | − | ATT | 847 | TCTGGCCAGATTGGTT | 2853 | UCUGGCCAGAUUGGUU |
| intron1 | | C | | GATGGACTCATTAA | | GAUGGACUCAUUAA |
| STMN2_ | − | ATT | 848 | AAGAATTCTCTGGCCA | 2854 | AAGAAUUCUCUGGCCA |
| intron1 | | A | | GATTGGTTGATGGA | | GAUUGGUUGAUGGA |
| STMN2_ | − | TTT | 849 | ATAGGTAAATAATAT | 2855 | AUAGGUAAAUAAUAUA |
| intron1 | | G | | ACACAACTTTATTAT | | CACAACUUUAUUAU |
| STMN2_ | − | TTT | 850 | ATTAAAGAATTCTCTG | 2856 | AUUAAAGAAUUCUCUG |
| intron1 | | A | | GCCAGATTGGTTGA | | GCCAGAUUGGUUGA |
| STMN2_ | − | ATT | 851 | TAATTAAAGAATTCTC | 2857 | UAAUUAAAGAAUUCUC |
| intron1 | | T | | TGGCCAGATTGGTT | | UGGCCAGAUUGGUU |
| STMN2_ | − | TTT | 852 | GGAAGCATTTTAATTA | 2858 | GGAAGCAUUUUAAUUA |
| intron1 | | G | | AAGAATTCTCTGGC | | AAGAAUUCUCUGGC |
| STMN2_ | − | ATT | 853 | GGGAAGCATTTTAATT | 2859 | GGGAAGCAUUUUAAUU |
| intron1 | | T | | AAAGAATTCTCTGG | | AAAGAAUUCUCUGG |
| STMN2_ | − | ATT | 854 | TCAGTAAAATTTGGG | 2860 | UCAGUAAAAUUUGGGA |
| intron1 | | C | | AAGCATTTTAATTAA | | AGCAUUUUAAUUAA |
| STMN2_ | − | CTT | 855 | AGACCTAATAGAGTG | 2861 | AGACCUAAUAGAGUGA |
| intron1 | | C | | AGAACCTCTGGGGGT | | GAACCUCUGGGGGU |
| STMN2_ | − | GTT | 856 | GAAATGCAAATCCAT | 2862 | GAAAUGCAAAUCCAUG |
| intron1 | | A | | GGGACCTGCTTCAGA | | GGACCUGCUUCAGA |
| STMN2_ | − | CTT | 857 | TTAGAAATGCAAATC | 2863 | UUAGAAAUGCAAAUCC |
| intron1 | | G | | CATGGGACCTGCTTC | | AUGGGACCUGCUUC |
| STMN2_ | − | GTT | 858 | TGAATCAGCCTCATCA | 2864 | UGAAUCAGCCUCAUCA |
| intron1 | | c | | GCACCACCTGGGAG | | GCACCACCUGGGAG |
| STMN2_ | + | TTTC | 859 | TAACAAGCTCCCAGGT | 2865 | UAACAAGCUCCCAGGU |
| intron1 | | | | GGTGCTGATGAGGC | | GGUGCUGAUGAGGC |
| STMN2_ | + | ATT | 860 | CTAACAAGCTCCCAG | 2866 | CUAACAAGCUCCCAGG |
| intron1 | | T | | GTGGTGCTGATGAGG | | UGGUGCUGAUGAGG |
| STMN2_ | + | TTT | 861 | CATTTCTAACAAGCTC | 2867 | CAUUUCUAACAAGCUC |
| intron1 | | G | | CCAGGTGGTGCTGA | | CCAGGUGGUGCUGA |
| STMN2_ | + | ATT | 862 | GCATTTCTAACAAGCT | 2868 | GCAUUUCUAACAAGCU |
| intron1 | | T | | CCCAGGTGGTGCTG | | CCCAGGUGGUGCUG |
| STMN2_ | + | ATT | 863 | GGTCTGAAGCAGGTC | 2869 | GGUCUGAAGCAGGUCC |
| intron1 | | A | | CCATGGATTTGCATT | | CAUGGAUUUGCAUU |
| STMN2_ | − | TTTT | 864 | AATTAAAGAATTCTCT | 2870 | AAUUAAAGAAUUCUCU |
| intron1 | | | | GGCCAGATTGGTTG | | GGCCAGAUUGGUUG |
| STMN2_ | − | CTTT | 865 | ATTATATGTAATATAT | 2871 | AUUAUAUGUAAUAUAU |
| intron1 | | | | ATATTATATGTTAT | | AUAUUAUAUGUUAU |
| STMN2_ | − | TTT | 866 | TTATATGTAATATATA | 2872 | UUAUAUGUAAUAUAUA |
| intron1 | | A | | TATTATATGTTATA | | UAUUAUAUGUUAUA |
| STMN2_ | − | ATT | 867 | TATGTAATATATATAT | 2873 | UAUGUAAUAUAUAUAU |
| intron1 | | A | | TATATGTTATAATA | | UAUAUGUUAUAAUA |
| STMN2_ | − | TTT | 868 | TTAATGGAAGTTAAA | 2874 | UUAAUGGAAGUUAAAC |
| intron1 | | G | | CTTTATGGCTGCATT | | UUUAUGGCUGCAUU |
| STMN2_ | − | CTTT | 869 | GTTAATGGAAGTTAA | 2875 | GUUAAUGGAAGUUAAA |
| intron1 | | | | ACTTTATGGCTGCAT | | CUUUAUGGCUGCAU |
| STMN2_ | − | TTT | 870 | CTGTGAGCAGCTTTGT | 2876 | CUGUGAGCAGCUUUGU |
| intron1 | | A | | TAATGGAAGTTAAA | | UAAUGGAAGUUAAA |
| STMN2_ | − | GTT | 871 | ACTGTGAGCAGCTTTG | 2877 | ACUGUGAGCAGCUUUG |
| intron1 | | T | | TTAATGGAAGTTAA | | UUAAUGGAAGUUAA |
| STMN2_ | − | ATT | 872 | TAATAGGTTTACTGTG | 2878 | UAAUAGGUUUACUGUG |
| intron1 | | A | | AGCAGCTTTGTTAA | | AGCAGCUUUGUUAA |
| STMN2_ | − | ATT | 873 | TTATAATAGGTTTACT | 2879 | UUAUAAUAGGUUUACU |
| intron1 | | A | | GTGAGCAGCTTTGT | | GUGAGCAGCUUUGU |
| STMN2_ | − | GTT | 874 | CTCCTCACTAGGAAGC | 2880 | CUCCUCACUAGGAAGC |
| intron1 | | G | | CCAAACTGGGAAAC | | CCAAACUGGGAAAC |
| STMN2_ | − | GTT | 875 | GGTTGCTCCTCACTAG | 2881 | GGUUGCUCCUCACUAG |
| intron1 | | A | | GAAGCCCAAACTGG | | GAAGCCCAAACUGG |
| STMN2_ | − | TTTC | 876 | GTGTGAGTTAGGTTGC | 2882 | GUGUGAGUUAGGUUGC |
| intron1 | | | | TCCTCACTAGGAAG | | UCCUCACUAGGAAG |
| STMN2_ | − | GTT | 877 | CGTGTGAGTTAGGTTG | 2883 | CGUGUGAGUUAGGUUG |
| intron1 | | T | | CTCCTCACTAGGAA | | CUCCUCACUAGGAA |
| STMN2_ | − | GTT | 878 | TTTCGTGTGAGTTAGG | 2884 | UUUCGUGUGAGUUAGG |
| intron1 | | G | | TTGCTCCTCACTAG | | UUGCUCCUCACUAG |
| STMN2_ | − | GTT | 879 | GGGTTGTTTCGTGTGA | 2885 | GGGUUGUUUCGUGUGA |
| intron1 | | G | | GTTAGGTTGCTCCT | | GUUAGGUUGCUCCU |
| STMN2_ | − | ATT | 880 | TAAGTTGGGGTTGTTT | 2886 | UAAGUUGGGGUUGUUU |
| intron1 | | A | | CGTGTGAGTTAGGT | | CGUGUGAGUUAGGU |
| STMN2_ | − | TTT | 881 | TAACAGTCAATATATT | 2887 | UAACAGUCAAUAUAUU |
| intron1 | | G | | ATAAGTTGGGGTTG | | AUAAGUUGGGGUUG |
| STMN2_ | − | TTTT | 882 | GTAACAGTCAATATAT | 2888 | GUAACAGUCAAUAUAU |
| intron1 | | | | TATAAGTTGGGGTT | | UAUAAGUUGGGGUU |
| STMN2_ | − | GTT | 883 | TGTAACAGTCAATATA | 2889 | UGUAACAGUCAAUAUA |
| intron1 | | T | | TTATAAGTTGGGGT | | UUAUAAGUUGGGGU |
| STMN2_ | − | TTTC | 884 | TGGTCTCAGTTTTGTA | 2890 | UGGUCUCAGUUUUGUA |
| intron1 | | | | ACAGTCAATATATT | | ACAGUCAAUAUAUU |
| STMN2_ | − | TTTT | 885 | CTGGTCTCAGTTTTGT | 2891 | CUGGUCUCAGUUUUGU |
| intron1 | | | | AACAGTCAATATAT | | AACAGUCAAUAUAU |
| STMN2_ | − | ATT | 886 | TCTGGTCTCAGTTTTG | 2892 | UCUGGUCUCAGUUUUG |
| intron1 | | T | | TAACAGTCAATATA | | UAACAGUCAAUAUA |
| STMN2_ | − | CTT | 887 | ATGGGATTTTCTGGTC | 2893 | AUGGGAUUUUCUGGUC |
| intron1 | | G | | TCAGTTTTGTAACA | | UCAGUUUUGUAACA |
| STMN2_ | − | CTT | 888 | CCGAGAGTCTGGAAA | 2894 | CCGAGAGUCUGGAAAU |
| intron1 | | C | | TGATAACAGTACCAT | | GAUAACAGUACCAU |
| STMN2_ | − | GTT | 889 | TTCCCGAGAGTCTGGA | 2895 | UUCCCGAGAGUCUGGA |
| intron1 | | C | | AATGATAACAGTAC | | AAUGAUAACAGUAC |
| STMN2_ | − | ATT | 890 | ATGTTCTTCCCGAGAG | 2896 | AUGUUCUUCCCGAGAG |
| intron1 | | A | | TCTGGAAATGATAA | | UCUGGAAAUGAUAA |
| STMN2_ | − | GTT | 891 | CCAGGGAGGCTGCAA | 2897 | CCAGGGAGGCUGCAAU |
| intron1 | | C | | TAAGTCTATCCTAAA | | AAGUCUAUCCUAAA |
| STMN2_ | − | GTT | 892 | TGAAGCAGAGTTCCC | 2898 | UGAAGCAGAGUUCCCA |
| intron1 | | C | | AGGGAGGCTGCAATA | | GGGAGGCUGCAAUA |
| STMN2_ | − | ATT | 893 | TGTTCTGAAGCAGAGT | 2899 | UGUUCUGAAGCAGAGU |
| intron1 | | A | | TCCCAGGGAGGCTG | | UCCCAGGGAGGCUG |
| STMN2_ | − | ATT | 894 | ATAAAAATAATTATGT | 2900 | AUAAAAAUAAUUAUGU |
| intron1 | | A | | TCTGAAGCAGAGTT | | UCUGAAGCAGAGUU |
| STMN2_ | − | GTT | 895 | ATGGAAGTTAAACTTT | 2901 | AUGGAAGUUAAACUUU |
| intron1 | | A | | ATGGCTGCATTTCA | | AUGGCUGCAUUUCA |
| STMN2_ | − | GTT | 896 | AACTTTATGGCTGCAT | 2902 | AACUUUAUGGCUGCAU |
| intron1 | | A | | TTCATAAGGAAAAA | | UUCAUAAGGAAAAA |
| STMN2_ | − | CTTT | 897 | ATGGCTGCATTTCATA | 2903 | AUGGCUGCAUUUCAUA |
| intron1 | | | | AGGAAAAAAAACTT | | AGGAAAAAAAACUU |
| STMN2_ | − | TTT | 898 | TGGCTGCATTTCATAA | 2904 | UGGCUGCAUUUCAUAA |
| intron1 | | A | | GGAAAAAAAACTTC | | GGAAAAAAAACUUC |
| STMN2_ | − | ATT | 899 | TTCCAGAAGAATAAC | 2905 | UUCCAGAAGAAUAACU |
| intron1 | | A | | TGCTAAATGGGCACT | | GCUAAAUGGGCACU |
| STMN2_ | − | GTT | 900 | ATGTGCGAACTCCAAC | 2906 | AUGUGCGAACUCCAAC |
| intron1 | | A | | ATCCAAAATACAAT | | AUCCAAAAUACAAU |
| STMN2_ | − | CTT | 901 | TACTAATGGTTAATGT | 2907 | UACUAAUGGUUAAUGU |
| intron1 | | G | | GCGAACTCCAACAT | | GCGAACUCCAACAU |
| STMN2_ | − | ATT | 902 | GGTACTTGTACTAATG | 2908 | GGUACUUGUACUAAUG |
| intron1 | | G | | GTTAATGTGCGAAC | | GUUAAUGUGCGAAC |
| STMN2_ | − | GTT | 903 | TATTGGGTACTTGTAC | 2909 | UAUUGGGUACUUGUAC |
| intron1 | | A | | TAATGGTTAATGTG | | UAAUGGUUAAUGUG |
| STMN2_ | − | ATT | 904 | TTATATTGGGTACTTG | 2910 | UUAUAUUGGGUACUUG |
| intron1 | | G | | TACTAATGGTTAAT | | UACUAAUGGUUAAU |
| STMN2_ | − | ATT | 905 | TCCTGATGATCTATTG | 2911 | UCCUGAUGAUCUAUUG |
| intron1 | | A | | TTATATTGGGTACT | | UUAUAUUGGGUACU |
| STMN2_ | − | TTT | 906 | TTATCCTGATGATCTA | 2912 | UUAUCCUGAUGAUCUA |
| intron1 | | A | | TTGTTATATTGGGT | | UUGUUAUAUUGGGU |
| STMN2_ | − | ATT | 907 | ATTATCCTGATGATCT | 2913 | AUUAUCCUGAUGAUCU |
| intron1 | | T | | ATTGTTATATTGGG | | AUUGUUAUAUUGGG |
| STMN2_ | − | TTT | 908 | TCCTGATATAAAGAC | 2914 | UCCUGAUAUAAAGACA |
| intron1 | | A | | ATACAACTAAAAGAT | | UACAACUAAAAGAU |
| STMN2_ | − | CTTT | 909 | ATCCTGATATAAAGA | 2915 | AUCCUGAUAUAAAGAC |
| intron1 | | | | CATACAACTAAAAGA | | AUACAACUAAAAGA |
| STMN2_ | − | ATT | 910 | TCTTTATCCTGATATA | 2916 | UCUUUAUCCUGAUAUA |
| intron1 | | C | | AAGACATACAACTA | | AAGACAUACAACUA |
| STMN2_ | − | TTTC | 911 | ACTCAATTCTCTTTAT | 2917 | ACUCAAUUCUCUUUAU |
| intron1 | | | | CCTGATATAAAGAC | | CCUGAUAUAAAGAC |
| STMN2_ | − | GTT | 912 | GAAATAAAAAGTAAC | 2918 | GAAAUAAAAAGUAACU |
| intron1 | | G | | TCTGCATTAATAAAA | | CUGCAUUAAUAAAA |
| STMN2_ | − | ATT | 913 | CACTCAATTCTCTTTA | 2919 | CACUCAAUUCUCUUUA |
| intron1 | | T | | TCCTGATATAAAGA | | UCCUGAUAUAAAGA |
| STMN2_ | − | GTT | 914 | AGATAAATTTCACTCA | 2920 | AGAUAAAUUUCACUCA |
| intron1 | | T | | ATTCTCTTTATCCT | | AUUCUCUUUAUCCU |
| STMN2_ | − | TTT | 915 | TGGGACTAGGTTTAG | 2921 | UGGGACUAGGUUUAGA |
| intron1 | | G | | ATAAATTTCACTCAA | | UAAAUUUCACUCAA |
| STMN2_ | − | ATT | 916 | GTGGGACTAGGTTTA | 2922 | GUGGGACUAGGUUUAG |
| intron1 | | T | | GATAAATTTCACTCA | | AUAAAUUUCACUCA |
| STMN2_ | − | CTT | 917 | TAAAAGTATTTGTGGG | 2923 | UAAAAGUAUUUGUGGG |
| intron1 | | G | | ACTAGGTTTAGATA | | ACUAGGUUUAGAUA |
| STMN2_ | − | TTT | 918 | ACATGCTCTCTTGTAA | 2924 | ACAUGCUCUCUUGUAA |
| intron1 | | A | | AAGTATTTGTGGGA | | AAGUAUUUGUGGGA |
| STMN2_ | − | CTTT | 919 | AACATGCTCTCTTGTA | 2925 | AACAUGCUCUCUUGUA |
| intron1 | | | | AAAGTATTTGTGGG | | AAAGUAUUUGUGGG |
| STMN2_ | − | TTT | 920 | CACTTTAACATGCTCT | 2926 | CACUUUAACAUGCUCU |
| intron1 | | A | | CTTGTAAAAGTATT | | CUUGUAAAAGUAUU |
| STMN2_ | − | ATT | 921 | ACACTTTAACATGCTC | 2927 | ACACUUUAACAUGCUC |
| intron1 | | T | | TCTTGTAAAAGTAT | | UCUUGUAAAAGUAU |
| STMN2_ | − | TTT | 922 | ATTTACACTTTAACAT | 2928 | AUUUACACUUUAACAU |
| intron1 | | A | | GCTCTCTTGTAAAA | | GCUCUCUUGUAAAA |
| STMN2_ | − | ATT | 923 | AATTTACACTTTAACA | 2929 | AAUUUACACUUUAACA |
| intron1 | | T | | TGCTCTCTTGTAAA | | UGCUCUCUUGUAAA |
| STMN2_ | − | CTT | 924 | CAAAGACAGAGTAGA | 2930 | CAAAGACAGAGUAGAA |
| intron1 | | C | | ATGCTAATAAAAATT | | UGCUAAUAAAAAUU |
| STMN2_ | − | TTTC | 925 | ATAAGGAAAAAAAAC | 2931 | AUAAGGAAAAAAAACU |
| intron1 | | | | TTCCAAAGACAGAGT | | UCCAAAGACAGAGU |
| STMN2_ | − | ATT | 926 | CATAAGGAAAAAAAA | 2932 | CAUAAGGAAAAAAAAC |
| intron1 | | T | | CTTCCAAAGACAGAG | | UUCCAAAGACAGAG |
| STMN2_ | − | TTT | 927 | GATAAATTTCACTCAA | 2933 | GAUAAAUUUCACUCAA |
| intron1 | | A | | TTCTCTTTATCCTG | | UUCUCUUUAUCCUG |
| STMN2_ | − | CTT | 928 | CAGGCGTTGCTTTACA | 2934 | CAGGCGUUGCUUUACA |
| intron1 | | G | | ATCTTTGTAAAAAA | | AUCUUUGUAAAAAA |
| STMN2_ | − | TTT | 929 | TTGGAAATAAAAAGT | 2935 | UUGGAAAUAAAAAGUA |
| intron1 | | G | | AACTCTGCATTAATA | | ACUCUGCAUUAAUA |
| STMN2_ | − | TTTT | 930 | TGTTGGAAATAAAAA | 2936 | UGUUGGAAAUAAAAAG |
| intron1 | | | | GTAACTCTGCATTAA | | UAACUCUGCAUUAA |
| STMN2_ | − | TTTT | 931 | GAACATTTTTTAGTCT | 2937 | GAACAUUUUUUAGUCU |
| intron1 | | | | TCTATGCTTGCCTG | | UCUAUGCUUGCCUG |
| STMN2_ | − | CTTT | 932 | TGAACATTTTTTAGTC | 2938 | UGAACAUUUUUUAGUC |
| intron1 | | | | TTCTATGCTTGCCT | | UUCUAUGCUUGCCU |
| STMN2_ | − | TTTC | 933 | TTTTGAACATTTTTTA | 2939 | UUUUGAACAUUUUUUA |
| intron1 | | | | GTCTTCTATGCTTG | | GUCUUCUAUGCUUG |
| STMN2_ | − | TTTT | 934 | CTTTTGAACATTTTTT | 2940 | CUUUUGAACAUUUUUU |
| intron1 | | | | AGTCTTCTATGCTT | | AGUCUUCUAUGCUU |
| STMN2_ | − | TTTT | 935 | TCTTTTGAACATTTTT | 2941 | UCUUUUGAACAUUUUU |
| intron1 | | | | TAGTCTTCTATGCT | | UAGUCUUCUAUGCU |
| STMN2_ | − | ATT | 936 | TTCTTTTGAACATTTT | 2942 | UUCUUUUGAACAUUUU |
| intron1 | | T | | TTAGTCTTCTATGC | | UUAGUCUUCUAUGC |
| STMN2_ | − | TTT | 937 | ATTTTTCTTTTGAACA | 2943 | AUUUUUCUUUUGAACA |
| intron1 | | A | | TTTTTTAGTCTTCT | | UUUUUUAGUCUUCU |
| STMN2_ | − | ATT | 938 | AATTTTTCTTTTGAAC | 2944 | AAUUUUUCUUUUGAAC |
| intron1 | | T | | ATTTTTTAGTCTTC | | AUUUUUUAGUCUUC |
| STMN2_ | − | TTTC | 939 | TAAAAATGACAAGGT | 2945 | UAAAAAUGACAAGGUC |
| intron1 | | | | CCCATATAGATAGAT | | CCAUAUAGAUAGAU |
| STMN2_ | − | TTTT | 940 | CTAAAAATGACAAGG | 2946 | CUAAAAAUGACAAGGU |
| intron1 | | | | TCCCATATAGATAGA | | CCCAUAUAGAUAGA |
| STMN2_ | − | GTT | 941 | TCTAAAAATGACAAG | 2947 | UCUAAAAAUGACAAGG |
| intron1 | | T | | GTCCCATATAGATAG | | UCCCAUAUAGAUAG |
| STMN2_ | − | ATT | 942 | AAAAGGATGAAGCAG | 2948 | AAAAGGAUGAAGCAGG |
| intron1 | | C | | GTGAATGTTTTCTAA | | UGAAUGUUUUCUAA |
| STMN2_ | − | ATT | 943 | TATGAAGATTCAAAA | 2949 | UAUGAAGAUUCAAAAG |
| intron1 | | A | | GGATGAAGCAGGTGA | | GAUGAAGCAGGUGA |
| STMN2_ | − | CTT | 944 | TATAGTATGCCCATCT | 2950 | UAUAGUAUGCCCAUCU |
| intron1 | | G | | CAGAGGGATTATAT | | CAGAGGGAUUAUAU |
| STMN2_ | − | TTT | 945 | AATAAGACAACTTGT | 2951 | AAUAAGACAACUUGUA |
| intron1 | | A | | ATAGTATGCCCATCT | | UAGUAUGCCCAUCU |
| STMN2_ | − | CTTT | 946 | AAATAAGACAACTTG | 2952 | AAAUAAGACAACUUGU |
| intron1 | | | | TATAGTATGCCCATC | | AUAGUAUGCCCAUC |
| STMN2_ | − | TTT | 947 | CCAATCTTTAAATAAG | 2953 | CCAAUCUUUAAAUAAG |
| intron1 | | A | | ACAACTTGTATAGT | | ACAACUUGUAUAGU |
| STMN2_ | − | ATT | 948 | ACCAATCTTTAAATAA | 2954 | ACCAAUCUUUAAAUAA |
| intron1 | | T | | GACAACTTGTATAG | | GACAACUUGUAUAG |
| STMN2_ | − | CTT | 949 | AATTTACCAATCTTTA | 2955 | AAUUUACCAAUCUUUA |
| intron1 | | A | | AATAAGACAACTTG | | AAUAAGACAACUUG |
| STMN2_ | − | TTT | 950 | AGCTTAAATTTACCAA | 2956 | AGCUUAAAUUUACCAA |
| intron1 | | G | | TCTTTAAATAAGAC | | UCUUUAAAUAAGAC |
| STMN2_ | − | ATT | 951 | GAGCTTAAATTTACCA | 2957 | GAGCUUAAAUUUACCA |
| intron1 | | T | | ATCTTTAAATAAGA | | AUCUUUAAAUAAGA |
| STMN2_ | − | ATT | 952 | TTTGAGCTTAAATTTA | 2958 | UUUGAGCUUAAAUUUA |
| intron1 | | A | | CCAATCTTTAAATA | | CCAAUCUUUAAAUA |
| STMN2_ | − | CTT | 953 | CCACTGAATAAATTAT | 2959 | CCACUGAAUAAAUUAU |
| intron1 | | G | | TTGAGCTTAAATTT | | UUGAGCUUAAAUUU |
| STMN2_ | − | GTT | 954 | CGAGTCTGCCTCTGAG | 2960 | CGAGUCUGCCUCUGAG |
| intron1 | | C | | GCTTGCCACTGAAT | | GCUUGCCACUGAAU |
| STMN2_ | − | ATT | 955 | GACCTGTGTTCCGAGT | 2961 | GACCUGUGUUCCGAGU |
| intron1 | | A | | CTGCCTCTGAGGCT | | CUGCCUCUGAGGCU |
| STMN2_ | − | GTT | 956 | TAATATATATATAATA | 2962 | UAAUAUAUAUAUAAUA |
| intron1 | | A | | TATATTAGACCTGT | | UAUAUUAGACCUGU |
| STMN2_ | − | ATT | 957 | TATGTTATAATATATA | 2963 | UAUGUUAUAAUAUAUA |
| intron1 | | A | | TATAATATATATTA | | UAUAAUAUAUAUUA |
| STMN2_ | − | TTT | 958 | AACATTTTTTAGTCTT | 2964 | AACAUUUUUUAGUCUU |
| intron1 | | G | | CTATGCTTGCCTGC | | CUAUGCUUGCCUGC |
| STMN2_ | − | ATT | 959 | TTTAGTCTTCTATGCT | 2965 | UUUAGUCUUCUAUGCU |
| intron1 | | T | | TGCCTGCTCCTTTT | | UGCCUGCUCCUUUU |
| STMN2_ | − | TTTT | 960 | TTAGTCTTCTATGCTT | 2966 | UUAGUCUUCUAUGCUU |
| intron1 | | | | GCCTGCTCCTTTTA | | GCCUGCUCCUUUUA |
| STMN2_ | − | TTTT | 961 | TAGTCTTCTATGCTTG | 2967 | UAGUCUUCUAUGCUUG |
| intron1 | | | | CCTGCTCCTTTTAA | | CCUGCUCCUUUUAA |
| STMN2_ | − | ATT | 962 | TTGTTGGAAATAAAA | 2968 | UUGUUGGAAAUAAAAA |
| intron1 | | T | | AGTAACTCTGCATTA | | GUAACUCUGCAUUA |
| STMN2_ | − | CTT | 963 | AATAATAACAATAGA | 2969 | AAUAAUAACAAUAGAU |
| intron1 | | A | | TATTTTTGTTGGAAA | | AUUUUUGUUGGAAA |
| STMN2_ | − | TTTC | 964 | TCAGATAAAGCTGTA | 2970 | UCAGAUAAAGCUGUAA |
| intron1 | | | | AGACTTAAATAATAA | | GACUUAAAUAAUAA |
| STMN2_ | − | ATT | 965 | CTCAGATAAAGCTGT | 2971 | CUCAGAUAAAGCUGUA |
| intron1 | | T | | AAGACTTAAATAATA | | AGACUUAAAUAAUA |
| STMN2_ | − | ATT | 966 | GAATTTCTCAGATAAA | 2972 | GAAUUUCUCAGAUAAA |
| intron1 | | G | | GCTGTAAGACTTAA | | GCUGUAAGACUUAA |
| STMN2_ | − | ATT | 967 | TGAGAAGGGTGCTAA | 2973 | UGAGAAGGGUGCUAAU |
| intron1 | | A | | TTGGAATTTCTCAGA | | UGGAAUUUCUCAGA |
| STMN2_ | − | TTT | 968 | TTATGAGAAGGGTGC | 2974 | UUAUGAGAAGGGUGCU |
| intron1 | | A | | TAATTGGAATTTCTC | | AAUUGGAAUUUCUC |
| STMN2_ | − | ATT | 969 | ATTATGAGAAGGGTG | 2975 | AUUAUGAGAAGGGUGC |
| intron1 | | T | | CTAATTGGAATTTCT | | UAAUUGGAAUUUCU |
| STMN2_ | − | TTT | 970 | AATATTTATTATGAGA | 2976 | AAUAUUUAUUAUGAGA |
| intron1 | | G | | AGGGTGCTAATTGG | | AGGGUGCUAAUUGG |
| STMN2_ | − | GTT | 971 | GAATATTTATTATGAG | 2977 | GAAUAUUUAUUAUGAG |
| intron1 | | T | | AAGGGTGCTAATTG | | AAGGGUGCUAAUUG |
| STMN2_ | − | TTTC | 972 | ATGTGTTTGAATATTT | 2978 | AUGUGUUUGAAUAUUU |
| intron1 | | | | ATTATGAGAAGGGT | | AUUAUGAGAAGGGU |
| STMN2_ | − | TTTT | 973 | CATGTGTTTGAATATT | 2979 | CAUGUGUUUGAAUAUU |
| intron1 | | | | TATTATGAGAAGGG | | UAUUAUGAGAAGGG |
| STMN2_ | − | TTTT | 974 | TCATGTGTTTGAATAT | 2980 | UCAUGUGUUUGAAUAU |
| intron1 | | | | TTATTATGAGAAGG | | UUAUUAUGAGAAGG |
| STMN2_ | − | TTTT | 975 | GTTGGAAATAAAAAG | 2981 | GUUGGAAAUAAAAAGU |
| intron1 | | | | TAACTCTGCATTAAT | | AACUCUGCAUUAAU |
| STMN2_ | − | ATT | 976 | TTCATGTGTTTGAATA | 2982 | UUCAUGUGUUUGAAUA |
| intron1 | | T | | TTTATTATGAGAAG | | UUUAUUAUGAGAAG |
| STMN2_ | − | CTTT | 977 | GGTAATTTTTCATGTG | 2983 | GGUAAUUUUUCAUGUG |
| intron1 | | | | TTTGAATATTTATT | | UUUGAAUAUUUAUU |
| STMN2_ | − | ATT | 978 | AAAGACTAGAACAAC | 2984 | AAAGACUAGAACAACU |
| intron1 | | A | | TTTGGTAATTTTTCA | | UUGGUAAUUUUUCA |
| STMN2_ | − | TTT | 979 | AAGTGACAAGAGTGC | 2985 | AAGUGACAAGAGUGCA |
| intron1 | | A | | AGGATCATGTAATAT | | GGAUCAUGUAAUAU |
| STMN2_ | − | TTTT | 980 | AAAGTGACAAGAGTG | 2986 | AAAGUGACAAGAGUGC |
| intron1 | | | | CAGGATCATGTAATA | | AGGAUCAUGUAAUA |
| STMN2_ | − | TTTT | 981 | TAAAGTGACAAGAGT | 2987 | UAAAGUGACAAGAGUG |
| intron1 | | | | GCAGGATCATGTAAT | | CAGGAUCAUGUAAU |
| STMN2_ | − | ATT | 982 | TTAAAGTGACAAGAG | 2988 | UUAAAGUGACAAGAGU |
| intron1 | | T | | TGCAGGATCATGTAA | | GCAGGAUCAUGUAA |
| STMN2_ | − | TTT | 983 | AAAAACTATATAAGA | 2989 | AAAAACUAUAUAAGAA |
| intron1 | | A | | AAAAAATCATCAGAA | | AAAAAUCAUCAGAA |
| STMN2_ | − | TTTT | 984 | AAAAAACTATATAAG | 2990 | AAAAAACUAUAUAAGA |
| intron1 | | | | AAAAAAATCATCAGA | | AAAAAAUCAUCAGA |
| STMN2_ | − | CTTT | 985 | TAAAAAACTATATAA | 2991 | UAAAAAACUAUAUAAG |
| intron1 | | | | GAAAAAAATCATCAG | | AAAAAAAUCAUCAG |
| STMN2_ | − | CTT | 986 | CCTGCTCCTTTTAAAA | 2992 | CCUGCUCCUUUUAAAA |
| intron1 | | G | | AACTATATAAGAAA | | AACUAUAUAAGAAA |
| STMN2_ | − | CTT | 987 | TATGCTTGCCTGCTCC | 2993 | UAUGCUUGCCUGCUCC |
| intron1 | | C | | TTTTAAAAAACTAT | | UUUUAAAAAACUAU |
| STMN2_ | − | TTT | 988 | GTCTTCTATGCTTGCC | 2994 | GUCUUCUAUGCUUGCC |
| intron1 | | A | | TGCTCCTTTTAAAA | | UGCUCCUUUUAAAA |
| STMN2_ | − | TTTT | 989 | AGTCTTCTATGCTTGC | 2995 | AGUCUUCUAUGCUUGC |
| intron1 | | | | CTGCTCCTTTTAAA | | CUGCUCCUUUUAAA |
| STMN2_ | − | TTT | 990 | GTAATTTTTCATGTGT | 2996 | GUAAUUUUUCAUGUGU |
| intron1 | | G | | TTGAATATTTATTA | | UUGAAUAUUUAUUA |
| STMN2_ | + | CTT | 991 | GTGGATTTAGTCTTTT | 2997 | GUGGAUUUAGUCUUUU |
| intron1 | | G | | GCAGAAAAAAAGAT | | GCAGAAAAAAAGAU |
| STMN2_ | − | GTT | 992 | GGAAGTAAAATATTTT | 2998 | GGAAGUAAAAUAUUUU |
| intron1 | | C | | GTAAAGATTACCAT | | GUAAAGAUUACCAU |
| STMN2_ | − | TTTT | 993 | GTAAAGATTACCATA | 2999 | GUAAAGAUUACCAUAG |
| intron1 | | | | GATTTAAAAATGTTA | | AUUUAAAAAUGUUA |
| STMN2_ | − | TTT | 994 | CCTTTTTGTGGGGGAA | 3000 | CCUUUUUGUGGGGGAA |
| intron1 | | A | | AGGGATGAGGGCAA | | AGGGAUGAGGGCAA |
| STMN2_ | − | ATT | 995 | ACCTTTTTGTGGGGGA | 3001 | ACCUUUUUGUGGGGGA |
| intron1 | | T | | AAGGGATGAGGGCA | | AAGGGAUGAGGGCA |
| STMN2_ | − | CTT | 996 | AAATGAACAACTGGA | 3002 | AAAUGAACAACUGGAG |
| intron1 | | A | | GACAAATTTACCTTT | | ACAAAUUUACCUUU |
| STMN2_ | − | TTT | 997 | TAACTTAAAATGAAC | 3003 | UAACUUAAAAUGAACA |
| intron1 | | A | | AACTGGAGACAAATT | | ACUGGAGACAAAUU |
| STMN2_ | − | CTTT | 998 | ATAACTTAAAATGAA | 3004 | AUAACUUAAAAUGAAC |
| intron1 | | | | CAACTGGAGACAAAT | | AACUGGAGACAAAU |
| STMN2_ | − | TTT | 999 | CTTTATAACTTAAAAT | 3005 | CUUUAUAACUUAAAAU |
| intron1 | | G | | GAACAACTGGAGAC | | GAACAACUGGAGAC |
| STMN2_ | − | ATT | 1000 | GCTTTATAACTTAAAA | 3006 | GCUUUAUAACUUAAAA |
| intron1 | | T | | TGAACAACTGGAGA | | UGAACAACUGGAGA |
| STMN2_ | − | CTT | 1001 | GCCACATGAACATAC | 3007 | GCCACAUGAACAUACA |
| intron1 | | A | | ATAATCCTGGCAGGA | | UAAUCCUGGCAGGA |
| STMN2_ | − | CTT | 1002 | CACATGTATCTTAGCC | 3008 | CACAUGUAUCUUAGCC |
| intron1 | | G | | ACATGAACATACAT | | ACAUGAACAUACAU |
| STMN2_ | − | CTT | 1003 | GCAAGCACTTGCACAT | 3009 | GCAAGCACUUGCACAU |
| intron1 | | A | | GTATCTTAGCCACA | | GUAUCUUAGCCACA |
| STMN2_ | − | GTT | 1004 | GCACACAAACCCTGCT | 3010 | GCACACAAACCCUGCU |
| intron1 | | G | | CTTAGCAAGCACTT | | CUUAGCAAGCACUU |
| STMN2_ | − | TTTC | 1005 | CAGCAATCGTTGGCAC | 3011 | CAGCAAUCGUUGGCAC |
| intron1 | | | | ACAAACCCTGCTCT | | ACAAACCCUGCUCU |
| STMN2_ | − | TTTT | 1006 | CCAGCAATCGTTGGCA | 3012 | CCAGCAAUCGUUGGCA |
| intron1 | | | | CACAAACCCTGCTC | | CACAAACCCUGCUC |
| STMN2_ | − | ATT | 1007 | TCCAGCAATCGTTGGC | 3013 | UCCAGCAAUCGUUGGC |
| intron1 | | T | | ACACAAACCCTGCT | | ACACAAACCCUGCU |
| STMN2_ | − | TTT | 1008 | CAGAGAATTTTCCAGC | 3014 | CAGAGAAUUUUCCAGC |
| intron1 | | G | | AATCGTTGGCACAC | | AAUCGUUGGCACAC |
| STMN2_ | − | CTTT | 1009 | GCAGAGAATTTTCCA | 3015 | GCAGAGAAUUUUCCAG |
| intron1 | | | | GCAATCGTTGGCACA | | CAAUCGUUGGCACA |
| STMN2_ | − | ATT | 1010 | TTTGCAGAGAATTTTC | 3016 | UUUGCAGAGAAUUUUC |
| intron1 | | C | | CAGCAATCGTTGGC | | CAGCAAUCGUUGGC |
| STMN2_ | − | ATT | 1011 | CAGCCACAAACAATT | 3017 | CAGCCACAAACAAUUC |
| intron1 | | G | | CTTTGCAGAGAATTT | | UUUGCAGAGAAUUU |
| STMN2_ | − | ATT | 1012 | TCACCCATTGCAGCCA | 3018 | UCACCCAUUGCAGCCA |
| intron1 | | C | | CAAACAATTCTTTG | | CAAACAAUUCUUUG |
| STMN2_ | − | ATT | 1013 | TATATGTGTATTCTCA | 3019 | UAUAUGUGUAUUCUCA |
| intron1 | | A | | CCCATTGCAGCCAC | | CCCAUUGCAGCCAC |
| STMN2_ | − | GTT | 1014 | AAGATCATCTCAATTA | 3020 | AAGAUCAUCUCAAUUA |
| intron1 | | G | | TATATGTGTATTCT | | UAUAUGUGUAUUCU |
| STMN2_ | − | CTT | 1015 | TGTTGAAGATCATCTC | 3021 | UGUUGAAGAUCAUCUC |
| intron1 | | A | | AATTATATATGTGT | | AAUUAUAUAUGUGU |
| STMN2_ | − | TTT | 1016 | TAGATATAACCTTATG | 3022 | UAGAUAUAACCUUAUG |
| intron1 | | A | | TTGAAGATCATCTC | | UUGAAGAUCAUCUC |
| STMN2_ | − | ATT | 1017 | ATAGATATAACCTTAT | 3023 | AUAGAUAUAACCUUAU |
| intron1 | | T | | GTTGAAGATCATCT | | GUUGAAGAUCAUCU |
| STMN2_ | − | TTT | 1018 | TATATTTATAGATATA | 3024 | UAUAUUUAUAGAUAUA |
| intron1 | | A | | ACCTTATGTTGAAG | | ACCUUAUGUUGAAG |
| STMN2_ | − | ATT | 1019 | ATATATTTATAGATAT | 3025 | AUAUAUUUAUAGAUAU |
| intron1 | | T | | AACCTTATGTTGAA | | AACCUUAUGUUGAA |
| STMN2_ | − | TTT | 1020 | TGCATAAACTATATTT | 3026 | UGCAUAAACUAUAUUU |
| intron1 | | G | | ATATATTTATAGAT | | AUAUAUUUAUAGAU |
| STMN2_ | − | CTTT | 1021 | TTGTGGGGGAAAGGG | 3027 | UUGUGGGGGAAAGGGA |
| intron1 | | | | ATGAGGGCAATTAGG | | UGAGGGCAAUUAGG |
| STMN2_ | − | TTTT | 1022 | GTGCATAAACTATATT | 3028 | GUGCAUAAACUAUAUU |
| intron1 | | | | TATATATTTATAGA | | UAUAUAUUUAUAGA |
| STMN2_ | − | TTTT | 1023 | TGTGGGGGAAAGGGA | 3029 | UGUGGGGGAAAGGGAU |
| intron1 | | | | TGAGGGCAATTAGGA | | GAGGGCAAUUAGGA |
| STMN2_ | − | TTT | 1024 | TGGGGGAAAGGGATG | 3030 | UGGGGGAAAGGGAUGA |
| intron1 | | G | | AGGGCAATTAGGAGG | | GGGCAAUUAGGAGG |
| STMN2_ | − | GTT | 1025 | TGGACTGCGGGGCTG | 3031 | UGGACUGCGGGGCUGA |
| intron1 | | G | | AAAAAAGAGGTTCCA | | AAAAAGAGGUUCCA |
| STMN2_ | − | CTT | 1026 | GCTGGGAGGGGCTCG | 3032 | GCUGGGAGGGGCUCGG |
| intron1 | | G | | GTGCTGGGGCTGAGA | | UGCUGGGGCUGAGA |
| STMN2_ | − | TTTC | 1027 | TGCAGAGCCACCCGCT | 3033 | UGCAGAGCCACCCGCU |
| intron1 | | | | TGGCTGGGAGGGGC | | UGGCUGGGAGGGGC |
| STMN2_ | − | TTTT | 1028 | CTGCAGAGCCACCCG | 3034 | CUGCAGAGCCACCCGC |
| intron1 | | | | CTTGGCTGGGAGGGG | | UUGGCUGGGAGGGG |
| STMN2_ | − | CTTT | 1029 | TCTGCAGAGCCACCCG | 3035 | UCUGCAGAGCCACCCG |
| intron1 | | | | CTTGGCTGGGAGGG | | CUUGGCUGGGAGGG |
| STMN2_ | − | TTT | 1030 | TGTGGCCGGGCGGGG | 3036 | UGUGGCCGGGCGGGGC |
| intron1 | | G | | CTCGAGCCAGCTTTT | | UCGAGCCAGCUUUU |
| STMN2_ | − | CTTT | 1031 | GTGTGGCCGGGCGGG | 3037 | GUGUGGCCGGGCGGGG |
| intron1 | | | | GCTCGAGCCAGCTTT | | CUCGAGCCAGCUUU |
| STMN2_ | − | CTT | 1032 | GGCTGGGGGAAAAAA | 3038 | GGCUGGGGGAAAAAAA |
| intron1 | | G | | AGCCCCGAGCTCCGC | | GCCCCGAGCUCCGC |
| STMN2_ | − | ATT | 1033 | TGGAAAATCATAGAG | 3039 | UGGAAAAUCAUAGAGA |
| intron1 | | C | | AACAGAGGGTGGGCG | | ACAGAGGGUGGGCG |
| STMN2_ | − | CTT | 1034 | GAGAAGCCCCTCGCG | 3040 | GAGAAGCCCCUCGCGG |
| intron1 | | A | | GGGTCTCCATTCTGG | | GGUCUCCAUUCUGG |
| STMN2_ | − | ATT | 1035 | TGGAAAGCGGGGGTA | 3041 | UGGAAAGCGGGGGUAG |
| intron1 | | G | | GCTCAGGACACTGCG | | CUCAGGACACUGCG |
| STMN2_ | − | TTTC | 1036 | TGGACGTGCGAGTGA | 3042 | UGGACGUGCGAGUGAA |
| intron1 | | | | ACTGCGAATTGTGGA | | CUGCGAAUUGUGGA |
| STMN2_ | − | CTTT | 1037 | CTGGACGTGCGAGTG | 3043 | CUGGACGUGCGAGUGA |
| intron1 | | | | AACTGCGAATTGTGG | | ACUGCGAAUUGUGG |
| STMN2_ | − | ATT | 1038 | TCAGAACCTTTCTGGA | 3044 | UCAGAACCUUUCUGGA |
| intron1 | | C | | CGTGCGAGTGAACT | | CGUGCGAGUGAACU |
| STMN2_ | − | TTTC | 1039 | TGAGGGGTGCAGAAA | 3045 | UGAGGGGUGCAGAAAG |
| intron1 | | | | GCGAGGCGAGATCGC | | CGAGGCGAGAUCGC |
| STMN2_ | − | CTTT | 1040 | CTGAGGGGTGCAGAA | 3046 | CUGAGGGGUGCAGAAA |
| intron1 | | | | AGCGAGGCGAGATCG | | GCGAGGCGAGAUCG |
| STMN2_ | − | TTT | 1041 | CAGCCACTAGCCTGCA | 3047 | CAGCCACUAGCCUGCA |
| intron1 | | G | | GCGGAAACCTTTCT | | GCGGAAACCUUUCU |
| STMN2_ | − | GTT | 1042 | GCAGCCACTAGCCTGC | 3048 | GCAGCCACUAGCCUGC |
| intron1 | | T | | AGCGGAAACCTTTC | | AGCGGAAACCUUUC |
| STMN2_ | − | TTT | 1043 | AAATGATAATAATAC | 3049 | AAAUGAUAAUAAUACU |
| intron1 | | G | | TGATGATGACGATGA | | GAUGAUGACGAUGA |
| STMN2_ | − | ATT | 1044 | GAAATGATAATAATA | 3050 | GAAAUGAUAAUAAUAC |
| intron1 | | T | | CTGATGATGACGATG | | UGAUGAUGACGAUG |
| STMN2_ | − | ATT | 1045 | AATAATAACAACGAT | 3051 | AAUAAUAACAACGAUU |
| intron1 | | A | | TTGAAATGATAATAA | | UGAAAUGAUAAUAA |
| STMN2_ | − | TTT | 1046 | AACAAATGAGAACAA | 3052 | AACAAAUGAGAACAAA |
| intron1 | | G | | ACAAGGCTACTGAAT | | CAAGGCUACUGAAU |
| STMN2_ | − | TTTT | 1047 | GAACAAATGAGAACA | 3053 | GAACAAAUGAGAACAA |
| intron1 | | | | AACAAGGCTACTGAA | | ACAAGGCUACUGAA |
| STMN2_ | − | CTTT | 1048 | TGAACAAATGAGAAC | 3054 | UGAACAAAUGAGAACA |
| intron1 | | | | AAACAAGGCTACTGA | | AACAAGGCUACUGA |
| STMN2_ | − | CTT | 1049 | ACCAAGAGCAATCCA | 3055 | ACCAAGAGCAAUCCAC |
| intron1 | | A | | CGTCCCTTTTGAACA | | GUCCCUUUUGAACA |
| STMN2_ | − | GTT | 1050 | ATCCTTAACCAAGAGC | 3056 | AUCCUUAACCAAGAGC |
| intron1 | | A | | AATCCACGTCCCTT | | AAUCCACGUCCCUU |
| STMN2_ | − | ATT | 1051 | GGAGGAAGCAAAGCG | 3057 | GGAGGAAGCAAAGCGA |
| intron1 | | A | | AACGCAACAAGGGTT | | ACGCAACAAGGGUU |
| STMN2_ | − | TTTT | 1052 | GTGGGGGAAAGGGAT | 3058 | GUGGGGGAAAGGGAUG |
| intron1 | | | | GAGGGCAATTAGGAG | | AGGGCAAUUAGGAG |
| STMN2_ | − | ATT | 1053 | TGTGCATAAACTATAT | 3059 | UGUGCAUAAACUAUAU |
| intron1 | | T | | TTATATATTTATAG | | UUAUAUAUUUAUAG |
| STMN2_ | − | CTT | 1054 | AAATTTTGTGCATAAA | 3060 | AAAUUUUGUGCAUAAA |
| intron1 | | A | | CTATATTTATATAT | | CUAUAUUUAUAUAU |
| STMN2_ | − | TTTC | 1055 | AGGGGAAAAAACTTA | 3061 | AGGGGAAAAAACUUAA |
| intron1 | | | | AAATTTTGTGCATAA | | AAUUUUGUGCAUAA |
| STMN2_ | − | ATT | 1056 | ATTTCAAAATCTATTA | 3062 | AUUUCAAAAUCUAUUA |
| intron1 | | A | | TTTTAATACTGCAG | | UUUUAAUACUGCAG |
| STMN2_ | − | ATT | 1057 | GAATTAATTTCAAAAT | 3063 | GAAUUAAUUUCAAAAU |
| intron1 | | G | | CTATTATTTTAATA | | CUAUUAUUUUAAUA |
| STMN2_ | − | TTT | 1058 | AAATTGGAATTAATTT | 3064 | AAAUUGGAAUUAAUUU |
| intron1 | | G | | CAAAATCTATTATT | | CAAAAUCUAUUAUU |
| STMN2_ | − | CTTT | 1059 | GAAATTGGAATTAATT | 3065 | GAAAUUGGAAUUAAUU |
| intron1 | | | | TCAAAATCTATTAT | | UCAAAAUCUAUUAU |
| STMN2_ | − | ATT | 1060 | TCTTTGAAATTGGAAT | 3066 | UCUUUGAAAUUGGAAU |
| intron1 | | A | | TAATTTCAAAATCT | | UAAUUUCAAAAUCU |
| STMN2_ | − | ATT | 1061 | ATTATCTTTGAAATTG | 3067 | AUUAUCUUUGAAAUUG |
| intron1 | | A | | GAATTAATTTCAAA | | GAAUUAAUUUCAAA |
| STMN2_ | − | TTT | 1062 | ATGAATCAGGAAAAA | 3068 | AUGAAUCAGGAAAAAA |
| intron1 | | A | | AGCACTCGCCCTGAT | | GCACUCGCCCUGAU |
| STMN2_ | − | GTT | 1063 | AATGAATCAGGAAAA | 3069 | AAUGAAUCAGGAAAAA |
| intron1 | | T | | AAGCACTCGCCCTGA | | AGCACUCGCCCUGA |
| STMN2_ | − | ATT | 1064 | TTTAATGAATCAGGA | 3070 | UUUAAUGAAUCAGGAA |
| intron1 | | G | | AAAAAGCACTCGCCC | | AAAAGCACUCGCCC |
| STMN2_ | − | CTT | 1065 | CAATCATGCTGAATAC | 3071 | CAAUCAUGCUGAAUAC |
| intron1 | | A | | ATAATTGTTTAATG | | AUAAUUGUUUAAUG |
| STMN2_ | − | ATT | 1066 | TATGCACCTCTTACAA | 3072 | UAUGCACCUCUUACAA |
| intron1 | | A | | TCATGCTGAATACA | | UCAUGCUGAAUACA |
| STMN2_ | − | ATT | 1067 | GAAAAGATAATGGGG | 3073 | GAAAAGAUAAUGGGGA |
| intron1 | | A | | AATATTATATGCACC | | AUAUUAUAUGCACC |
| STMN2_ | − | CTT | 1068 | ATTAGAAAAGATAAT | 3074 | AUUAGAAAAGAUAAUG |
| intron1 | | C | | GGGGAATATTATATG | | GGGAAUAUUAUAUG |
| STMN2_ | − | ATT | 1069 | AGAAGGTGCCCACTTC | 3075 | AGAAGGUGCCCACUUC |
| intron1 | | C | | ATTAGAAAAGATAA | | AUUAGAAAAGAUAA |
| STMN2_ | − | CTT | 1070 | TATATCCATTCAGAAG | 3076 | UAUAUCCAUUCAGAAG |
| intron1 | | A | | GTGCCCACTTCATT | | GUGCCCACUUCAUU |
| STMN2_ | − | GTT | 1071 | CTTATATATCCATTCA | 3077 | CUUAUAUAUCCAUUCA |
| intron1 | | A | | GAAGGTGCCCACTT | | GAAGGUGCCCACUU |
| STMN2_ | − | TTTC | 1072 | TAGTTACTTATATATC | 3078 | UAGUUACUUAUAUAUC |
| intron1 | | | | CATTCAGAAGGTGC | | CAUUCAGAAGGUGC |
| STMN2_ | − | ATT | 1073 | CTAGTTACTTATATAT | 3079 | CUAGUUACUUAUAUAU |
| intron1 | | T | | CCATTCAGAAGGTG | | CCAUUCAGAAGGUG |
| STMN2_ | − | TTTC | 1074 | ATTTCTAGTTACTTAT | 3080 | AUUUCUAGUUACUUAU |
| intron1 | | | | ATATCCATTCAGAA | | AUAUCCAUUCAGAA |
| STMN2_ | − | TTTT | 1075 | CATTTCTAGTTACTTA | 3081 | CAUUUCUAGUUACUUA |
| intron1 | | | | TATATCCATTCAGA | | UAUAUCCAUUCAGA |
| STMN2_ | − | CTTT | 1076 | TCATTTCTAGTTACTT | 3082 | UCAUUUCUAGUUACUU |
| intron1 | | | | ATATATCCATTCAG | | AUAUAUCCAUUCAG |
| STMN2_ | − | ATT | 1077 | TGACCAAATCCTCAGC | 3083 | UGACCAAAUCCUCAGC |
| intron1 | | C | | TTTTCATTTCTAGT | | UUUUCAUUUCUAGU |
| STMN2_ | − | TTT | 1078 | TCCTGAAATTCTGACC | 3084 | UCCUGAAAUUCUGACC |
| intron1 | | A | | AAATCCTCAGCTTT | | AAAUCCUCAGCUUU |
| STMN2_ | − | TTTT | 1079 | ATCCTGAAATTCTGAC | 3085 | AUCCUGAAAUUCUGAC |
| intron1 | | | | CAAATCCTCAGCTT | | CAAAUCCUCAGCUU |
| STMN2_ | − | GTT | 1080 | TATCCTGAAATTCTGA | 3086 | UAUCCUGAAAUUCUGA |
| intron1 | | T | | CCAAATCCTCAGCT | | CCAAAUCCUCAGCU |
| STMN2_ | − | TTTC | 1081 | agttttatcctgaaat | 3087 | AGUUUUAUCCUGAAAU |
| intron1 | | | | TCTGACCAAATCCT | | UCUGACCAAAUCCU |
| STMN2_ | − | CTTT | 1082 | CAGTTTTATCCTGAAA | 3088 | CAGUUUUAUCCUGAAA |
| intron1 | | | | TTCTGACCAAATCC | | UUCUGACCAAAUCC |
| STMN2_ | − | ATT | 1083 | CAAAATCTATTATTTT | 3089 | CAAAAUCUAUUAUUUU |
| intron1 | | T | | AATACTGCAGAAGT | | AAUACUGCAGAAGU |
| STMN2_ | − | TTTC | 1084 | AAAATCTATTATTTTA | 3090 | AAAAUCUAUUAUUUUA |
| intron1 | | | | ATACTGCAGAAGTA | | AUACUGCAGAAGUA |
| STMN2_ | − | ATT | 1085 | TTTTAATACTGCAGAA | 3091 | UUUUAAUACUGCAGAA |
| intron1 | | A | | GTAGTGTTTTTTTC | | GUAGUGUUUUUUUC |
| STMN2_ | − | ATT | 1086 | TAATACTGCAGAAGT | 3092 | UAAUACUGCAGAAGUA |
| intron1 | | T | | AGTGTTTTTTTCATG | | GUGUUUUUUUCAUG |
| STMN2_ | − | GTT | 1087 | CAGGGGAAAAAACTT | 3093 | CAGGGGAAAAAACUUA |
| intron1 | | T | | aaaattttgtgcata | | AAAUUUUGUGCAUA |
| STMN2_ | − | GTT | 1088 | GAAGAACAGTTTCAG | 3094 | GAAGAACAGUUUCAGG |
| intron1 | | G | | GGGAAAAAACTTAAA | | GGAAAAAACUUAAA |
| STMN2_ | − | ATT | 1089 | AGGCTGTATCAAGAA | 3095 | AGGCUGUAUCAAGAAU |
| intron1 | | G | | TCAGCAGTTGGAAGA | | CAGCAGUUGGAAGA |
| STMN2_ | − | TTTC | 1090 | ACGATCCATGTATCTG | 3096 | ACGAUCCAUGUAUCUG |
| intron1 | | | | TGTAGGATTGAGGC | | UGUAGGAUUGAGGC |
| STMN2_ | − | ATT | 1091 | CACGATCCATGTATCT | 3097 | CACGAUCCAUGUAUCU |
| intron1 | | T | | GTGTAGGATTGAGG | | GUGUAGGAUUGAGG |
| STMN2_ | − | TTT | 1092 | GATGGCGGCTACCATT | 3098 | GAUGGCGGCUACCAUU |
| intron1 | | G | | TCACGATCCATGTA | | UCACGAUCCAUGUA |
| STMN2_ | − | ATT | 1093 | GGATGGCGGCTACCA | 3099 | GGAUGGCGGCUACCAU |
| intron1 | | T | | TTTCACGATCCATGT | | UUCACGAUCCAUGU |
| STMN2_ | − | TTT | 1094 | TTTGGATGGCGGCTAC | 3100 | UUUGGAUGGCGGCUAC |
| intron1 | | A | | CATTTCACGATCCA | | CAUUUCACGAUCCA |
| STMN2_ | − | TTTT | 1095 | ATTTGGATGGCGGCTA | 3101 | AUUUGGAUGGCGGCUA |
| intron1 | | | | CCATTTCACGATCC | | CCAUUUCACGAUCC |
| STMN2_ | − | TTTT | 1096 | TATTTGGATGGCGGCT | 3102 | UAUUUGGAUGGCGGCU |
| intron1 | | | | ACCATTTCACGATC | | ACCAUUUCACGAUC |
| STMN2_ | − | ATT | 1097 | TTATTTGGATGGCGGC | 3103 | UUAUUUGGAUGGCGGC |
| intron1 | | T | | TACCATTTCACGAT | | UACCAUUUCACGAU |
| STMN2_ | − | TTT | 1098 | GGGTGGGATTTTTATT | 3104 | GGGUGGGAUUUUUAUU |
| intron1 | | G | | TGGATGGCGGCTAC | | UGGAUGGCGGCUAC |
| STMN2_ | − | ATT | 1099 | GGGGTGGGATTTTTAT | 3105 | GGGGUGGGAUUUUUAU |
| intron1 | | T | | TTGGATGGCGGCTA | | UUGGAUGGCGGCUA |
| STMN2_ | − | GTT | 1100 | CAGGACTGCATACAG | 3106 | CAGGACUGCAUACAGC |
| intron1 | | C | | CTCAACTGCCCCTCC | | UCAACUGCCCCUCC |
| STMN2_ | − | TTT | 1101 | TCATATTTGGGGTGGG | 3107 | UCAUAUUUGGGGUGGG |
| intron1 | | G | | ATTTTTATTTGGAT | | AUUUUUAUUUGGAU |
| STMN2_ | − | CTT | 1102 | CGTTTGTCATATTTGG | 3108 | CGUUUGUCAUAUUUGG |
| intron1 | | G | | GGTGGGATTTTTAT | | GGUGGGAUUUUUAU |
| STMN2_ | − | ATT | 1103 | TGGCCAGAAAGGATG | 3109 | UGGCCAGAAAGGAUGC |
| intron1 | | A | | CTTGCGTTTGTCATA | | UUGCGUUUGUCAUA |
| STMN2_ | − | GTT | 1104 | AATTATGGCCAGAAA | 3110 | AAUUAUGGCCAGAAAG |
| intron1 | | A | | GGATGCTTGCGTTTG | | GAUGCUUGCGUUUG |
| STMN2_ | − | TTT | 1105 | CAAATGCAGTTAAATT | 3111 | CAAAUGCAGUUAAAUU |
| intron1 | | G | | ATGGCCAGAAAGGA | | AUGGCCAGAAAGGA |
| STMN2_ | − | ATT | 1106 | GCAAATGCAGTTAAA | 3112 | GCAAAUGCAGUUAAAU |
| intron1 | | T | | TTATGGCCAGAAAGG | | UAUGGCCAGAAAGG |
| STMN2_ | − | TTTC | 1107 | ATGATTTGCAAATGCA | 3113 | AUGAUUUGCAAAUGCA |
| intron1 | | | | GTTAAATTATGGCC | | GUUAAAUUAUGGCC |
| STMN2_ | − | TTTT | 1108 | CATGATTTGCAAATGC | 3114 | CAUGAUUUGCAAAUGC |
| intron1 | | | | AGTTAAATTATGGC | | AGUUAAAUUAUGGC |
| STMN2_ | − | TTTT | 1109 | TCATGATTTGCAAATG | 3115 | UCAUGAUUUGCAAAUG |
| intron1 | | | | CAGTTAAATTATGG | | CAGUUAAAUUAUGG |
| STMN2_ | − | TTTT | 1110 | TTCATGATTTGCAAAT | 3116 | UUCAUGAUUUGCAAAU |
| intron1 | | | | GCAGTTAAATTATG | | GCAGUUAAAUUAUG |
| STMN2_ | − | TTTT | 1111 | TTTCATGATTTGCAAA | 3117 | UUUCAUGAUUUGCAAA |
| intron1 | | | | TGCAGTTAAATTAT | | UGCAGUUAAAUUAU |
| STMN2_ | − | GTT | 1112 | TTTTCATGATTTGCAA | 3118 | UUUUCAUGAUUUGCAA |
| intron1 | | T | | ATGCAGTTAAATTA | | AUGCAGUUAAAUUA |
| STMN2_ | − | TTT | 1113 | ATACTGCAGAAGTAG | 3119 | AUACUGCAGAAGUAGU |
| intron1 | | A | | TGTTTTTTTCATGAT | | GUUUUUUUCAUGAU |
| STMN2_ | − | TTTT | 1114 | AATACTGCAGAAGTA | 3120 | AAUACUGCAGAAGUAG |
| intron1 | | | | GTGTTTTTTTCATGA | | UGUUUUUUUCAUGA |
| STMN2_ | − | GTT | 1115 | GTCATATTTGGGGTGG | 3121 | GUCAUAUUUGGGGUGG |
| intron1 | | T | | GATTTTTATTTGGA | | GAUUUUUAUUUGGA |
| STMN2_ | − | ATT | 1116 | CTCTTCCCCGCCAGTC | 3122 | CUCUUCCCCGCCAGUC |
| intron1 | | C | | TCGGAGCCTGAGGT | | UCGGAGCCUGAGGU |
| STMN2_ | − | CTT | 1117 | CCCGCCAGTCTCGGAG | 3123 | CCCGCCAGUCUCGGAG |
| intron1 | | C | | CCTGAGGTCTCCCC | | CCUGAGGUCUCCCC |
| STMN2_ | − | CTTT | 1118 | CGGCAGCTTTCCCTGT | 3124 | CGGCAGCUUUCCCUGU |
| intron1 | | | | CTCCGCATCCTGCA | | CUCCGCAUCCUGCA |
| STMN2_ | − | TTTC | 1119 | CAAAATGTCCCTTAAG | 3125 | CAAAAUGUCCCUUAAG |
| intron1 | | | | CCCATTTAAGGCAA | | CCCAUUUAAGGCAA |
| STMN2_ | − | CTTT | 1120 | CCAAAATGTCCCTTAA | 3126 | CCAAAAUGUCCCUUAA |
| intron1 | | | | GCCCATTTAAGGCA | | GCCCAUUUAAGGCA |
| STMN2_ | − | GTT | 1121 | TAAAGCACTTTCCAAA | 3127 | UAAAGCACUUUCCAAA |
| intron1 | | A | | ATGTCCCTTAAGCC | | AUGUCCCUUAAGCC |
| STMN2_ | − | CTT | 1122 | AACTAGAGAAGAAAT | 3128 | AACUAGAGAAGAAAUA |
| intron1 | | A | | AAAAAAAAAAAAGGT | | AAAAAAAAAAAGGU |
| STMN2_ | − | CTT | 1123 | TTAAACTAGAGAAGA | 3129 | UUAAACUAGAGAAGAA |
| intron1 | | C | | AATAAAAAAAAAAAA | | AUAAAAAAAAAAAA |
| STMN2_ | − | TTTC | 1124 | TTCTTAAACTAGAGAA | 3130 | UUCUUAAACUAGAGAA |
| intron1 | | | | GAAATAAAAAAAAA | | GAAAUAAAAAAAAA |
| STMN2_ | − | TTTT | 1125 | CTTCTTAAACTAGAGA | 3131 | CUUCUUAAACUAGAGA |
| intron1 | | | | AGAAATAAAAAAAA | | AGAAAUAAAAAAAA |
| STMN2_ | − | ATT | 1126 | TCTTCTTAAACTAGAG | 3132 | UCUUCUUAAACUAGAG |
| intron1 | | T | | AAGAAATAAAAAAA | | AAGAAAUAAAAAAA |
| STMN2_ | − | TTTC | 1127 | CTATTTTCTTCTTAAA | 3133 | CUAUUUUCUUCUUAAA |
| intron1 | | | | CTAGAGAAGAAATA | | CUAGAGAAGAAAUA |
| STMN2_ | − | CTTT | 1128 | CCTATTTTCTTCTTAA | 3134 | CCUAUUUUCUUCUUAA |
| intron1 | | | | ACTAGAGAAGAAAT | | ACUAGAGAAGAAAU |
| STMN2_ | − | TTT | 1129 | CCCCTTTCCTATTTTCT | 3135 | CCCCUUUCCUAUUUUC |
| intron1 | | A | | TCTTAAACTAGAG | | UUCUUAAACUAGAG |
| STMN2_ | − | CTTT | 1130 | ACCCCTTTCCTATTTT | 3136 | ACCCCUUUCCUAUUUU |
| intron1 | | | | CTTCTTAAACTAGA | | CUUCUUAAACUAGA |
| STMN2_ | − | CTT | 1131 | CCTTTACCCCTTTCCT | 3137 | CCUUUACCCCUUUCCU |
| intron1 | | C | | ATTTTCTTCTTAAA | | AUUUUCUUCUUAAA |
| STMN2_ | − | TTTC | 1132 | TCCCACCTTCCCTTTA | 3138 | UCCCACCUUCCCUUUA |
| intron1 | | | | CCCCTTTCCTATTT | | CCCCUUUCCUAUUU |
| STMN2_ | − | CTTT | 1133 | CTCCCACCTTCCCTTT | 3139 | CUCCCACCUUCCCUUU |
| intron1 | | | | ACCCCTTTCCTATT | | ACCCCUUUCCUAUU |
| STMN2_ | − | TTTC | 1134 | CTTTCTCCCACCTTCC | 3140 | CUUUCUCCCACCUUCC |
| intron1 | | | | CTTTACCCCTTTCC | | CUUUACCCCUUUCC |
| STMN2_ | − | TTTT | 1135 | CCTTTCTCCCACCTTC | 3141 | CCUUUCUCCCACCUUC |
| intron1 | | | | CCTTTACCCCTTTC | | CCUUUACCCCUUUC |
| STMN2_ | − | TTTT | 1136 | TCCTTTCTCCCACCTT | 3143 | UCCUUUCUCCCACCUU |
| intron1 | | | | CCCTTTACCCCTTT | | CCCUUUACCCCUUU |
| STMN2_ | − | CTTT | 1137 | TTCCTTTCTCCCACCTT | 3142 | UUCCUUUCUCCCACCU |
| intron1 | | | | CCCTTTACCCCTT | | UCCCUUUACCCCUU |
| STMN2_ | − | TTTC | 1138 | TTTTTCCTTTCTCCCAC | 3144 | UUUUUCCUUUCUCCCA |
| intron1 | | | | CTTCCCTTTACCC | | CCUUCCCUUUACCC |
| STMN2_ | − | TTTT | 1139 | CTTTTTCCTTTCTCCCA | 3145 | CUUUUUCCUUUCUCCC |
| intron1 | | | | CCTTCCCTTTACC | | ACCUUCCCUUUACC |
| STMN2_ | − | ATT | 1140 | TCTTTTTCCTTTCTCCC | 3146 | UCUUUUUCCUUUCUCC |
| intron1 | | T | | ACCTTCCCTTTAC | | CACCUUCCCUUUAC |
| STMN2_ | − | TTT | 1141 | CAATTTTCTTTTTCCTT | 3147 | CAAUUUUCUUUUUCCU |
| intron1 | | G | | TCTCCCACCTTCC | | UUCUCCCACCUUCC |
| STMN2_ | − | CTTT | 1142 | GCAATTTTCTTTTTCC | 3148 | GCAAUUUUCUUUUUCC |
| intron1 | | | | TTTCTCCCACCTTC | | UUUCUCCCACCUUC |
| STMN2_ | − | TTT | 1143 | ACTTTGCAATTTTCTT | 3149 | ACUUUGCAAUUUUCUU |
| intron1 | | G | | TTTCCTTTCTCCCA | | UUUCCUUUCUCCCA |
| STMN2_ | − | CTTT | 1144 | GACTTTGCAATTTTCT | 3150 | GACUUUGCAAUUUUCU |
| intron1 | | | | TTTTCCTTTCTCCC | | UUUUCCUUUCUCCC |
| STMN2_ | − | TTTC | 1145 | AAACAGCGGGATGGG | 3151 | AAACAGCGGGAUGGGA |
| intron1 | | | | ACCGCTTTGACTTTG | | CCGCUUUGACUUUG |
| STMN2_ | − | CTT | 1146 | AGCCCATTTAAGGCA | 3152 | AGCCCAUUUAAGGCAA |
| intron1 | | A | | AACAGTTAAGGTAGC | | ACAGUUAAGGUAGC |
| STMN2_ | − | ATT | 1147 | AAGGCAAACAGTTAA | 3153 | AAGGCAAACAGUUAAG |
| intron1 | | T | | GGTAGCTTCCTCCCC | | GUAGCUUCCUCCCC |
| STMN2_ | − | TTT | 1148 | AGGCAAACAGTTAAG | 3154 | AGGCAAACAGUUAAGG |
| intron1 | | A | | GTAGCTTCCTCCCCT | | UAGCUUCCUCCCCU |
| STMN2_ | − | GTT | 1149 | AGGTAGCTTCCTCCCC | 3155 | AGGUAGCUUCCUCCCC |
| intron1 | | A | | TCACGATTGAGTCC | | UCACGAUUGAGUCC |
| STMN2_ | − | CTT | 1150 | TAGAGCTCAAGAGAG | 3156 | UAGAGCUCAAGAGAGG |
| intron1 | | C | | GAGGTGAGAGGTGGG | | AGGUGAGAGGUGGG |
| STMN2_ | − | TTT | 1151 | TAAAATATCTCTGAAT | 3157 | UAAAAUAUCUCUGAAU |
| intron1 | | A | | GCTTCTAGAGCTCA | | GCUUCUAGAGCUCA |
| STMN2_ | − | CTTT | 1152 | ATAAAATATCTCTGAA | 3158 | AUAAAAUAUCUCUGAA |
| intron1 | | | | TGCTTCTAGAGCTC | | UGCUUCUAGAGCUC |
| STMN2_ | − | TTTC | 1153 | TTTATAAAATATCTCT | 3159 | UUUAUAAAAUAUCUCU |
| intron1 | | | | GAATGCTTCTAGAG | | GAAUGCUUCUAGAG |
| STMN2_ | − | TTTT | 1154 | CTTTATAAAATATCTC | 3160 | CUUUAUAAAAUAUCUC |
| intron1 | | | | TGAATGCTTCTAGA | | UGAAUGCUUCUAGA |
| STMN2_ | − | TTTT | 1155 | TCTTTATAAAATATCT | 3161 | UCUUUAUAAAAUAUCU |
| intron1 | | | | CTGAATGCTTCTAG | | CUGAAUGCUUCUAG |
| STMN2_ | − | CTTT | 1156 | TTCTTTATAAAATATC | 3162 | UUCUUUAUAAAAUAUC |
| intron1 | | | | TCTGAATGCTTCTA | | UCUGAAUGCUUCUA |
| STMN2_ | − | ATT | 1157 | ACATCTTTTTCTTTAT | 3163 | ACAUCUUUUUCUUUAU |
| intron1 | | A | | AAAATATCTCTGAA | | AAAAUAUCUCUGAA |
| STMN2_ | − | GTT | 1158 | CCATTAACATCTTTTT | 3164 | CCAUUAACAUCUUUUU |
| intron1 | | A | | CTTTATAAAATATC | | CUUUAUAAAAUAUC |
| STMN2_ | − | CTT | 1159 | CTGGTCCTGTGTTACC | 3165 | CUGGUCCUGUGUUACC |
| intron1 | | C | | ATTAACATCTTTTT | | AUUAACAUCUUUUU |
| STMN2_ | − | CTT | 1160 | TCTGCCCTCCCACCTC | 3166 | UCUGCCCUCCCACCUCC |
| intron1 | | C | | CCCCAGAACTGCCC | | CCCAGAACUGCCC |
| STMN2_ | − | TTTC | 1161 | CATAGACCTCTTCTCT | 3167 | CAUAGACCUCUUCUCU |
| intron1 | | | | GCCCTCCCACCTCC | | GCCCUCCCACCUCC |
| STMN2_ | − | ATT | 1162 | CCATAGACCTCTTCTC | 3168 | CCAUAGACCUCUUCUC |
| intron1 | | T | | TGCCCTCCCACCTC | | UGCCCUCCCACCUC |
| STMN2_ | − | CTTT | 1163 | CAAACAGCGGGATGG | 3169 | CAAACAGCGGGAUGGG |
| intron1 | | | | GACCGCTTTGACTTT | | ACCGCUUUGACUUU |
| STMN2_ | − | TTT | 1164 | GATTTCCATAGACCTC | 3170 | GAUUUCCAUAGACCUC |
| intron1 | | A | | TTCTCTGCCCTCCC | | UUCUCUGCCCUCCC |
| STMN2_ | − | CTT | 1165 | GCTTTAGATTTCCATA | 3171 | GCUUUAGAUUUCCAUA |
| intron1 | | C | | GACCTCTTCTCTGC | | GACCUCUUCUCUGC |
| STMN2_ | − | ATT | 1166 | TTCGCTTTAGATTTCC | 3172 | UUCGCUUUAGAUUUCC |
| intron1 | | C | | ATAGACCTCTTCTC | | AUAGACCUCUUCUC |
| STMN2_ | − | TTT | 1167 | AAAGAAATTCTTCGCT | 3173 | AAAGAAAUUCUUCGCU |
| intron1 | | A | | TTAGATTTCCATAG | | UUAGAUUUCCAUAG |
| STMN2_ | − | TTTT | 1168 | AAAAGAAATTCTTCG | 3174 | AAAAGAAAUUCUUCGC |
| intron1 | | | | CTTTAGATTTCCATA | | UUUAGAUUUCCAUA |
| STMN2_ | − | CTTT | 1169 | TAAAAGAAATTCTTCG | 3175 | UAAAAGAAAUUCUUCG |
| intron1 | | | | CTTTAGATTTCCAT | | CUUUAGAUUUCCAU |
| STMN2_ | − | CTT | 1170 | TACCTTTTAAAAGAAA | 3176 | UACCUUUUAAAAGAAA |
| intron1 | | C | | TTCTTCGCTTTAGA | | UUCUUCGCUUUAGA |
| STMN2_ | − | CTT | 1171 | CCCGCTTCTACCTTTT | 3177 | CCCGCUUCUACCUUUU |
| intron1 | | A | | AAAAGAAATTCTTC | | AAAAGAAAUUCUUC |
| STMN2_ | − | ATT | 1172 | TCTACCCATAGGAGG | 3178 | UCUACCCAUAGGAGGG |
| intron1 | | C | | GCAACTTACCCGCTT | | CAACUUACCCGCUU |
| STMN2_ | − | TTT | 1173 | AATATGGAAACAGAA | 3179 | AAUAUGGAAACAGAAU |
| intron1 | | A | | TAAATTCTCTACCCA | | AAAUUCUCUACCCA |
| STMN2_ | − | TTTT | 1174 | AAATATGGAAACAGA | 3180 | AAAUAUGGAAACAGAA |
| intron1 | | | | ATAAATTCTCTACCC | | UAAAUUCUCUACCC |
| STMN2_ | − | ATT | 1175 | TAAATATGGAAACAG | 3181 | UAAAUAUGGAAACAGA |
| intron1 | | T | | AATAAATTCTCTACC | | AUAAAUUCUCUACC |
| STMN2_ | − | ATT | 1176 | AGTCCTAATTTTAAAT | 3182 | AGUCCUAAUUUUAAAU |
| intron1 | | G | | ATGGAAACAGAATA | | AUGGAAACAGAAUA |
| STMN2_ | − | CTT | 1177 | CTCCCCTCACGATTGA | 3183 | CUCCCCUCACGAUUGA |
| intron1 | | C | | GTCCTAATTTTAAA | | GUCCUAAUUUUAAA |
| STMN2_ | − | CTTT | 1178 | AGATTTCCATAGACCT | 3184 | AGAUUUCCAUAGACCU |
| intron1 | | | | CTTCTCTGCCCTCC | | CUUCUCUGCCCUCC |
| STMN2_ | − | TTTC | 1179 | TTTCAGTTTTATCCTG | 3185 | UUUCAGUUUUAUCCUG |
| intron1 | | | | AAATTCTGACCAAA | | AAAUUCUGACCAAA |
| STMN2_ | − | GTT | 1180 | TCTCCATCCCCTCCCC | 3186 | UCUCCAUCCCCUCCCCC |
| intron1 | | C | | CCGTCTCCACCCAT | | CGUCUCCACCCAU |
| STMN2_ | − | TTTC | 1181 | TTCGACGAGACAATA | 3187 | UUCGACGAGACAAUAC |
| intron1 | | | | CCGTAAAATGTGCCC | | CGUAAAAUGUGCCC |
| STMN2_ | − | TTT | 1182 | TATACGATTTCATGTC | 3188 | UAUACGAUUUCAUGUC |
| intron1 | | A | | ATCTCTATTATTAT | | AUCUCUAUUAUUAU |
| STMN2_ | − | CTTT | 1183 | ATATACGATTTCATGT | 3189 | AUAUACGAUUUCAUGU |
| intron1 | | | | CATCTCTATTATTA | | CAUCUCUAUUAUUA |
| STMN2_ | − | TTT | 1184 | CTTTATATACGATTTC | 3190 | CUUUAUAUACGAUUUC |
| intron1 | | G | | ATGTCATCTCTATT | | AUGUCAUCUCUAUU |
| STMN2_ | − | TTTT | 1185 | GCTTTATATACGATTT | 3191 | GCUUUAUAUACGAUUU |
| intron1 | | | | CATGTCATCTCTAT | | CAUGUCAUCUCUAU |
| STMN2_ | − | CTTT | 1186 | TGCTTTATATACGATT | 3192 | UGCUUUAUAUACGAUU |
| intron1 | | | | TCATGTCATCTCTA | | UCAUGUCAUCUCUA |
| STMN2_ | − | TTT | 1187 | ACCTCTTTTGCTTTAT | 3193 | ACCUCUUUUGCUUUAU |
| intron1 | | G | | ATACGATTTCATGT | | AUACGAUUUCAUGU |
| STMN2_ | − | CTTT | 1188 | GACCTCTTTTGCTTTA | 3194 | GACCUCUUUUGCUUUA |
| intron1 | | | | TATACGATTTCATG | | UAUACGAUUUCAUG |
| STMN2_ | − | CTT | 1189 | AGACTTTGACCTCTTT | 3195 | AGACUUUGACCUCUUU |
| intron1 | | A | | TGCTTTATATACGA | | UGCUUUAUAUACGA |
| STMN2_ | − | CTT | 1190 | ACTTAAGACTTTGACC | 3196 | ACUUAAGACUUUGACC |
| intron1 | | A | | TCTTTTGCTTTATA | | UCUUUUGCUUUAUA |
| STMN2_ | − | TTTC | 1191 | GCGTGGCTTAACTTAA | 3197 | GCGUGGCUUAACUUAA |
| intron1 | | | | GACTTTGACCTCTT | | GACUUUGACCUCUU |
| STMN2_ | − | ATT | 1192 | CGCGTGGCTTAACTTA | 3198 | CGCGUGGCUUAACUUA |
| intron1 | | T | | AGACTTTGACCTCT | | AGACUUUGACCUCU |
| STMN2_ | − | TTT | 1193 | GCACTGTCTGACCCAC | 3199 | GCACUGUCUGACCCAC |
| intron1 | | G | | AAAACGGAAATTTC | | AAAACGGAAAUUUC |
| STMN2_ | − | ATT | 1194 | GGCACTGTCTGACCCA | 3200 | GGCACUGUCUGACCCA |
| intron1 | | T | | CAAAACGGAAATTT | | CAAAACGGAAAUUU |
| STMN2_ | − | ATT | 1195 | CCGATATTTGGCACTG | 3201 | CCGAUAUUUGGCACUG |
| intron1 | | G | | TCTGACCCACAAAA | | UCUGACCCACAAAA |
| STMN2_ | − | CTT | 1196 | TGAAATTGCCGATATT | 3202 | UGAAAUUGCCGAUAUU |
| intron1 | | A | | TGGCACTGTCTGAC | | UGGCACUGUCUGAC |
| STMN2_ | − | CTT | 1197 | TCTCTCTGAGCTTATG | 3203 | UCUCUCUGAGCUUAUG |
| intron1 | | G | | AAATTGCCGATATT | | AAAUUGCCGAUAUU |
| STMN2_ | − | TTTC | 1198 | CGGTCATCCTGTGTCT | 3204 | CGGUCAUCCUGUGUCU |
| intron1 | | | | CCACTGTCTTGTCT | | CCACUGUCUUGUCU |
| STMN2_ | − | TTTT | 1199 | CCGGTCATCCTGTGTC | 3205 | CCGGUCAUCCUGUGUC |
| intron1 | | | | TCCACTGTCTTGTC | | UCCACUGUCUUGUC |
| STMN2_ | − | CTTT | 1200 | TCCGGTCATCCTGTGT | 3206 | UCCGGUCAUCCUGUGU |
| intron1 | | | | CTCCACTGTCTTGT | | CUCCACUGUCUUGU |
| STMN2_ | − | ATT | 1201 | CGGATGAAGGCCCTG | 3207 | CGGAUGAAGGCCCUGA |
| intron1 | | G | | AATCCAGAATCTTTT | | AUCCAGAAUCUUUU |
| STMN2_ | − | TTTC | 1202 | ACCCCGGGGCCACTG | 3208 | ACCCCGGGGCCACUGA |
| intron1 | | | | AGCGCCAGAACCGTG | | GCGCCAGAACCGUG |
| STMN2_ | − | TTTT | 1203 | CACCCCGGGGCCACT | 3209 | CACCCCGGGGCCACUG |
| intron1 | | | | GAGCGCCAGAACCGT | | AGCGCCAGAACCGU |
| STMN2_ | − | CTTT | 1204 | TCACCCCGGGGCCACT | 3210 | UCACCCCGGGGCCACU |
| intron1 | | | | GAGCGCCAGAACCG | | GAGCGCCAGAACCG |
| STMN2_ | − | CTT | 1205 | CAGCTGCCACAGGAC | 3211 | CAGCUGCCACAGGACC |
| intron1 | | C | | CCCAGGCCCCACCCT | | CCAGGCCCCACCCU |
| STMN2_ | − | TTTC | 1206 | CCTGTCTCCGCATCCT | 3212 | CCUGUCUCCGCAUCCU |
| intron1 | | | | GCAACCAAGTCCCG | | GCAACCAAGUCCCG |
| STMN2_ | − | CTTT | 1207 | CCCTGTCTCCGCATCC | 3213 | CCCUGUCUCCGCAUCC |
| intron1 | | | | TGCAACCAAGTCCC | | UGCAACCAAGUCCC |
| STMN2_ | − | TTTC | 1208 | GGCAGCTTTCCCTGTC | 3214 | GGCAGCUUUCCCUGUC |
| intron1 | | | | TCCGCATCCTGCAA | | UCCGCAUCCUGCAA |
| STMN2_ | − | ATT | 1209 | CATGTCATCTCTATTA | 3215 | CAUGUCAUCUCUAUUA |
| intron1 | | T | | TTATACATACACAT | | UUAUACAUACACAU |
| STMN2_ | − | TTTC | 1210 | ATGTCATCTCTATTAT | 3216 | AUGUCAUCUCUAUUAU |
| intron1 | | | | TATACATACACATG | | UAUACAUACACAUG |
| STMN2_ | − | ATT | 1211 | TTATACATACACATGT | 3217 | UUAUACAUACACAUGU |
| intron1 | | A | | CTAGGTTCTAGAAG | | CUAGGUUCUAGAAG |
| STMN2_ | − | ATT | 1212 | TACATACACATGTCTA | 3218 | UACAUACACAUGUCUA |
| intron1 | | A | | GGTTCTAGAAGCTT | | GGUUCUAGAAGCUU |
| STMN2_ | − | GTT | 1213 | CTTCGACGAGACAAT | 3219 | CUUCGACGAGACAAUA |
| intron1 | | T | | ACCGTAAAATGTGCC | | CCGUAAAAUGUGCC |
| STMN2_ | − | CTT | 1214 | CCTCCCTGCACCGCAC | 3220 | CCUCCCUGCACCGCACC |
| intron1 | | A | | CCCAGGACTAGCGG | | CCAGGACUAGCGG |
| STMN2_ | − | CTT | 1215 | CCCTAAAACAAAGGA | 3221 | CCCUAAAACAAAGGAG |
| intron1 | | G | | GCGGAGGTCCTACCC | | CGGAGGUCCUACCC |
| STMN2_ | − | CTT | 1216 | CCCTCCCTTGCCCTAA | 3222 | CCCUCCCUUGCCCUAA |
| intron1 | | C | | AACAAAGGAGCGGA | | AACAAAGGAGCGGA |
| STMN2_ | − | CTT | 1217 | CTCTCTCCTTCCCCTC | 3223 | CUCUCUCCUUCCCCUCC |
| intron1 | | C | | CCTTGCCCTAAAAC | | CUUGCCCUAAAAC |
| STMN2_ | − | CTT | 1218 | CCCGCCCCTGCAGCTG | 3224 | CCCGCCCCUGCAGCUGC |
| intron1 | | C | | CCCACCCGCGCCCT | | CCACCCGCGCCCU |
| STMN2_ | − | CTT | 1219 | GAAGCCGCTGTCCCTC | 3225 | GAAGCCGCUGUCCCUC |
| intron1 | | C | | CACCCCTCCCTGCC | | CACCCCUCCCUGCC |
| STMN2_ | − | ATT | 1220 | TGCGCCCAGCGCTGCA | 3226 | UGCGCCCAGCGCUGCA |
| intron1 | | G | | GGTGCCTCCCCCCG | | GGUGCCUCCCCCCG |
| STMN2_ | − | GTT | 1221 | CGCACTGGGTGGGGC | 3227 | CGCACUGGGUGGGGCU |
| intron1 | | C | | TGTCCGCATTGTGCG | | GUCCGCAUUGUGCG |
| STMN2_ | − | TTTC | 1222 | GAATGAAGATGCAGC | 3228 | GAAUGAAGAUGCAGCA |
| intron1 | | | | ACCGGGCGGGGGGGC | | CCGGGCGGGGGGGC |
| STMN2_ | − | CTTT | 1223 | CGAATGAAGATGCAG | 3229 | CGAAUGAAGAUGCAGC |
| intron1 | | | | CACCGGGCGGGGGGG | | ACCGGGCGGGGGGG |
| STMN2_ | − | GTT | 1224 | GGCTCCTGGGTGTCAC | 3230 | GGCUCCUGGGUGUCAC |
| intron1 | | G | | GCTGCGCTCCCCAC | | GCUGCGCUCCCCAC |
| STMN2_ | − | CTT | 1225 | GAAGCCGCGGCGGGG | 3231 | GAAGCCGCGGCGGGGA |
| intron1 | | G | | AGTCGGGAGCGGGGA | | GUCGGGAGCGGGGA |
| STMN2_ | − | CTT | 1226 | GACGAGACAATACCG | 3232 | GACGAGACAAUACCGU |
| intron1 | | C | | TAAAATGTGCCCAGT | | AAAAUGUGCCCAGU |
| STMN2_ | − | CTT | 1227 | AAAGCAGAACAATGA | 3233 | AAAGCAGAACAAUGAG |
| intron1 | | A | | GGCCAGCGTGGGGAG | | GCCAGCGUGGGGAG |
| STMN2_ | − | TTTT | 1228 | CCCATCTCTCTTAAAA | 3234 | CCCAUCUCUCUUAAAA |
| intron1 | | | | GCAGAACAATGAGG | | GCAGAACAAUGAGG |
| STMN2_ | − | CTTT | 1229 | TCCCATCTCTCTTAAA | 3235 | UCCCAUCUCUCUUAAA |
| intron1 | | | | AGCAGAACAATGAG | | AGCAGAACAAUGAG |
| STMN2_ | − | GTT | 1230 | ACCCACTTTTCCCATC | 3236 | ACCCACUUUUCCCAUC |
| intron1 | | A | | TCTCTTAAAAGCAG | | UCUCUUAAAAGCAG |
| STMN2_ | − | CTT | 1231 | CGAAAAGAAAAATGT | 3237 | CGAAAAGAAAAAUGUU |
| intron1 | | C | | TAACCCACTTTTCCC | | AACCCACUUUUCCC |
| STMN2_ | − | TTT | 1232 | CTTCCGAAAAGAAAA | 3238 | CUUCCGAAAAGAAAAA |
| intron1 | | G | | ATGTTAACCCACTTT | | UGUUAACCCACUUU |
| STMN2_ | − | ATT | 1233 | GCTTCCGAAAAGAAA | 3239 | GCUUCCGAAAAGAAAA |
| intron1 | | T | | AATGTTAACCCACTT | | AUGUUAACCCACUU |
| STMN2_ | − | TTT | 1234 | TCTGTGTCTATGTCTA | 3240 | UCUGUGUCUAUGUCUA |
| intron1 | | A | | AACACTCTATGTAA | | AACACUCUAUGUAA |
| STMN2_ | − | CTTT | 1235 | ATCTGTGTCTATGTCT | 3241 | AUCUGUGUCUAUGUCU |
| intron1 | | | | AAACACTCTATGTA | | AAACACUCUAUGUA |
| STMN2_ | − | CTT | 1236 | AAAGAACCCTTTATCT | 3242 | AAAGAACCCUUUAUCU |
| intron1 | | C | | GTGTCTATGTCTAA | | GUGUCUAUGUCUAA |
| STMN2_ | − | TTTC | 1237 | CCGCAAACGATCAAA | 3243 | CCGCAAACGAUCAAAG |
| intron1 | | | | GGTCTTCAAAGAACC | | GUCUUCAAAGAACC |
| STMN2_ | − | TTTT | 1238 | CCCGCAAACGATCAA | 3244 | CCCGCAAACGAUCAAA |
| intron1 | | | | AGGTCTTCAAAGAAC | | GGUCUUCAAAGAAC |
| STMN2_ | − | CTTT | 1239 | TCCCGCAAACGATCA | 3245 | UCCCGCAAACGAUCAA |
| intron1 | | | | AAGGTCTTCAAAGAA | | AGGUCUUCAAAGAA |
| STMN2_ | − | GTT | 1240 | TAGAAGCTTTTCCCGC | 3246 | UAGAAGCUUUUCCCGC |
| intron1 | | C | | AAACGATCAAAGGT | | AAACGAUCAAAGGU |
| STMN2_ | − | TTTC | 1241 | CCATCTCTCTTAAAAG | 3247 | CCAUCUCUCUUAAAAG |
| intron1 | | | | CAGAACAATGAGGC | | CAGAACAAUGAGGC |
| STMN2_ | − | ATT | 1242 | TGTAAAGATTACCATA | 3248 | UGUAAAGAUUACCAUA |
| intron1 | | T | | GATTTAAAAATGTT | | GAUUUAAAAAUGUU |
| STMN2_ | − | ATT | 1243 | CTTTCAGTTTTATCCT | 3249 | CUUUCAGUUUUAUCCU |
| intron1 | | T | | GAAATTCTGACCAA | | GAAAUUCUGACCAA |
| STMN2_ | − | ATT | 1244 | ATTGATAAACTACTGC | 3250 | AUUGAUAAACUACUGC |
| intron1 | | A | | CATTTCTTTCAGTT | | CAUUUCUUUCAGUU |
| STMN2_ | − | TTTC | 1245 | TACTATTTATCCACTA | 3251 | UACUAUUUAUCCACUA |
| intron1 | | | | CAAAATCTCAGAAG | | CAAAAUCUCAGAAG |
| STMN2_ | − | TTTT | 1246 | CTACTATTTATCCACT | 3252 | CUACUAUUUAUCCACU |
| intron1 | | | | ACAAAATCTCAGAA | | ACAAAAUCUCAGAA |
| STMN2_ | − | TTTT | 1247 | TCTACTATTTATCCAC | 3253 | UCUACUAUUUAUCCAC |
| intron1 | | | | TACAAAATCTCAGA | | UACAAAAUCUCAGA |
| STMN2_ | − | ATT | 1248 | TTCTACTATTTATCCA | 3254 | UUCUACUAUUUAUCCA |
| intron1 | | T | | CTACAAAATCTCAG | | CUACAAAAUCUCAG |
| STMN2_ | − | ATT | 1249 | CTACTGACATTTTTCT | 3255 | CUACUGACAUUUUUCU |
| intron1 | | A | | ACTATTTATCCACT | | ACUAUUUAUCCACU |
| STMN2_ | − | TTT | 1250 | CTATTACTACTGACAT | 3256 | CUAUUACUACUGACAU |
| intron1 | | G | | TTTTCTACTATTTA | | UUUUCUACUAUUUA |
| STMN2_ | − | CTTT | 1251 | GCTATTACTACTGACA | 3257 | GCUAUUACUACUGACA |
| intron1 | | | | TTTTTCTACTATTT | | UUUUUCUACUAUUU |
| STMN2_ | − | ATT | 1252 | GGCTGCTAAATAACTT | 3258 | GGCUGCUAAAUAACUU |
| intron1 | | C | | TGCTATTACTACTG | | UGCUAUUACUACUG |
| STMN2_ | − | ATT | 1253 | AAATATTCGGCTGCTA | 3259 | AAAUAUUCGGCUGCUA |
| intron1 | | A | | AATAACTTTGCTAT | | AAUAACUUUGCUAU |
| STMN2_ | − | TTT | 1254 | AGCATTAAAATATTCG | 3260 | AGCAUUAAAAUAUUCG |
| intron1 | | A | | GCTGCTAAATAACT | | GCUGCUAAAUAACU |
| STMN2_ | − | TTTT | 1255 | AAGCATTAAAATATTC | 3261 | AAGCAUUAAAAUAUUC |
| intron1 | | | | GGCTGCTAAATAAC | | GGCUGCUAAAUAAC |
| STMN2_ | − | TTTT | 1256 | TAAGCATTAAAATATT | 3262 | UAAGCAUUAAAAUAUU |
| intron1 | | | | CGGCTGCTAAATAA | | CGGCUGCUAAAUAA |
| STMN2_ | − | ATT | 1257 | TTAAGCATTAAAATAT | 3263 | UUAAGCAUUAAAAUAU |
| intron1 | | T | | TCGGCTGCTAAATA | | UCGGCUGCUAAAUA |
| STMN2_ | − | TTT | 1258 | TTTTTAAGCATTAAAA | 3264 | UUUUUAAGCAUUAAAA |
| intron1 | | A | | TATTCGGCTGCTAA | | UAUUCGGCUGCUAA |
| STMN2_ | − | CTTT | 1259 | ATTTTTAAGCATTAAA | 3265 | AUUUUUAAGCAUUAAA |
| intron1 | | | | ATATTCGGCTGCTA | | AUAUUCGGCUGCUA |
| STMN2_ | − | ATT | 1260 | CTTTATTTTTAAGCAT | 3266 | CUUUAUUUUUAAGCAU |
| intron1 | | C | | TAAAATATTCGGCT | | UAAAAUAUUCGGCU |
| STMN2_ | − | TTT | 1261 | TTCCTTTATTTTTAAG | 3267 | UUCCUUUAUUUUUAAG |
| intron1 | | A | | CATTAAAATATTCG | | CAUUAAAAUAUUCG |
| STMN2_ | − | ATT | 1262 | ATTCCTTTATTTTTAA | 3268 | AUUCCUUUAUUUUUAA |
| intron1 | | T | | GCATTAAAATATTC | | GCAUUAAAAUAUUC |
| STMN2_ | − | TTT | 1263 | ATTTATTCCTTTATTTT | 3269 | AUUUAUUCCUUUAUUU |
| intron1 | | A | | TAAGCATTAAAAT | | UUAAGCAUUAAAAU |
| STMN2_ | − | CTTT | 1264 | AATTTATTCCTTTATT | 3270 | AAUUUAUUCCUUUAUU |
| intron1 | | | | TTTAAGCATTAAAA | | UUUAAGCAUUAAAA |
| STMN2_ | − | TTTC | 1265 | TTTAATTTATTCCTTT | 3271 | UUUAAUUUAUUCCUUU |
| intron1 | | | | ATTTTTAAGCATTA | | AUUUUUAAGCAUUA |
| STMN2_ | − | TTTT | 1266 | CTTTAATTTATTCCTTT | 3272 | CUUUAAUUUAUUCCUU |
| intron1 | | | | ATTTTTAAGGATT | | UAUUUUUAAGCAUU |
| STMN2_ | − | ATT | 1267 | TCTTTAATTTATTCCTT | 3273 | UCUUUAAUUUAUUCCU |
| intron1 | | T | | TATTTTTAAGCAT | | UUAUUUUUAAGCAU |
| STMN2_ | − | ATT | 1268 | CAATCGATGAAGAAG | 3274 | CAAUCGAUGAAGAAGU |
| intron1 | | T | | TAAACAATGATTTTC | | AAACAAUGAUUUUC |
| STMN2_ | − | ATT | 1269 | AGATGTGCTCTGAAC | 3275 | AGAUGUGCUCUGAACA |
| intron1 | | C | | AGGGGGCACATTTCA | | GGGGGCACAUUUCA |
| STMN2_ | − | GTT | 1270 | TCTGCAGGTGGAGAC | 3276 | UCUGCAGGUGGAGACU |
| intron1 | | C | | TCTGATATTCAGATG | | CUGAUAUUCAGAUG |
| STMN2_ | − | TTT | 1271 | CTCGCTAAGCTGCATG | 3277 | CUCGCUAAGCUGCAUG |
| intron1 | | A | | TTCTCTGCAGGTGG | | UUCUCUGCAGGUGG |
| STMN2_ | − | ATT | 1272 | ATCCACTACAAAATCT | 3278 | AUCCACUACAAAAUCU |
| intron1 | | T | | CAGAAGTAACATAA | | CAGAAGUAACAUAA |
| STMN2_ | − | TTTT | 1273 | ACTCGCTAAGCTGCAT | 3279 | ACUCGCUAAGCUGCAU |
| intron1 | | | | GTTCTCTGCAGGTG | | GUUCUCUGCAGGUG |
| STMN2_ | − | TTT | 1274 | TCCACTACAAAATCTC | 3280 | UCCACUACAAAAUCUC |
| intron1 | | A | | AGAAGTAACATAAA | | AGAAGUAACAUAAA |
| STMN2_ | − | ATT | 1275 | ACCAGGGCGTGTATCT | 3281 | ACCAGGGCGUGUAUCU |
| intron1 | | A | | ACTTTCAGATTATG | | ACUUUCAGAUUAUG |
| STMN2_ | − | ATT | 1276 | CCCTCTAGTGTGGTGA | 3282 | CCCUCUAGUGUGGUGA |
| intron1 | | G | | AAAGTTAATGCAGA | | AAAGUUAAUGCAGA |
| STMN2_ | − | TTT | 1277 | GAGAACATGATTGCC | 3283 | GAGAACAUGAUUGCCC |
| intron1 | | A | | CTCTAGTGTGGTGAA | | UCUAGUGUGGUGAA |
| STMN2_ | − | TTTT | 1278 | AGAGAACATGATTGC | 3284 | AGAGAACAUGAUUGCC |
| intron1 | | | | CCTCTAGTGTGGTGA | | CUCUAGUGUGGUGA |
| STMN2_ | − | TTTT | 1279 | TAGAGAACATGATTG | 3285 | UAGAGAACAUGAUUGC |
| intron1 | | | | CCCTCTAGTGTGGTG | | CCUCUAGUGUGGUG |
| STMN2_ | − | TTTT | 1280 | TTAGAGAACATGATT | 3286 | UUAGAGAACAUGAUUG |
| intron1 | | | | GCCCTCTAGTGTGGT | | CCCUCUAGUGUGGU |
| STMN2_ | − | CTTT | 1281 | TTTAGAGAACATGATT | 3287 | UUUAGAGAACAUGAUU |
| intron1 | | | | GCCCTCTAGTGTGG | | GCCCUCUAGUGUGG |
| STMN2_ | − | TTT | 1282 | CATCAATCATCTGCTT | 3288 | CAUCAAUCAUCUGCUU |
| intron1 | | A | | TTTTAGAGAACATG | | UUUUAGAGAACAUG |
| STMN2_ | − | GTT | 1283 | ACATCAATCATCTGCT | 3289 | ACAUCAAUCAUCUGCU |
| intron1 | | T | | TTTTTAGAGAACAT | | UUUUUAGAGAACAU |
| STMN2_ | − | TTT | 1284 | GAACTAGGTTTACATC | 3290 | GAACUAGGUUUACAUC |
| intron1 | | G | | AATCATCTGCTTTT | | AAUCAUCUGCUUUU |
| STMN2_ | − | ATT | 1285 | GGAACTAGGTTTACAT | 3291 | GGAACUAGGUUUACAU |
| intron1 | | T | | CAATCATCTGCTTT | | CAAUCAUCUGCUUU |
| STMN2_ | − | GTT | 1286 | ATATTTGGAACTAGGT | 3292 | AUAUUUGGAACUAGGU |
| intron1 | | A | | TTACATCAATCATC | | UUACAUCAAUCAUC |
| STMN2_ | − | ATT | 1287 | AACAGTTAATATTTGG | 3293 | AACAGUUAAUAUUUGG |
| intron1 | | A | | AACTAGGTTTACAT | | AACUAGGUUUACAU |
| STMN2_ | − | TTT | 1288 | TTAAACAGTTAATATT | 3294 | UUAAACAGUUAAUAUU |
| intron1 | | A | | TGGAACTAGGTTTA | | UGGAACUAGGUUUA |
| STMN2_ | − | TTTT | 1289 | ATTAAACAGTTAATAT | 3295 | AUUAAACAGUUAAUAU |
| intron1 | | | | TTGGAACTAGGTTT | | UUGGAACUAGGUUU |
| STMN2_ | − | ATT | 1290 | TATTAAACAGTTAATA | 3296 | UAUUAAACAGUUAAUA |
| intron1 | | T | | TTTGGAACTAGGTT | | UUUGGAACUAGGUU |
| STMN2_ | − | GTT | 1291 | CTGGTAAAAGAAAAG | 3297 | CUGGUAAAAGAAAAGA |
| intron1 | | C | | ATTTTATTAAACAGT | | UUUUAUUAAACAGU |
| STMN2_ | − | CTT | 1292 | AATGTTCCTGGTAAAA | 3298 | AAUGUUCCUGGUAAAA |
| intron1 | | G | | GAAAAGATTTTATT | | GAAAAGAUUUUAUU |
| STMN2_ | − | ATT | 1293 | AATAAACACTTGAAT | 3299 | AAUAAACACUUGAAUG |
| intron1 | | G | | GTTCCTGGTAAAAGA | | UUCCUGGUAAAAGA |
| STMN2_ | − | CTT | 1294 | TTGAATAAACACTTGA | 3300 | UUGAAUAAACACUUGA |
| intron1 | | A | | ATGTTCCTGGTAAA | | AUGUUCCUGGUAAA |
| STMN2_ | − | GTT | 1295 | ATCCACTAGGGTAAA | 3301 | AUCCACUAGGGUAAAG |
| intron1 | | C | | GCATGGCATCAGCTT | | CAUGGCAUCAGCUU |
| STMN2_ | − | ATT | 1296 | TACAAGCTCTGTTCAT | 3302 | UACAAGCUCUGUUCAU |
| intron1 | | G | | CCACTAGGGTAAAG | | CCACUAGGGUAAAG |
| STMN2_ | − | CTT | 1297 | AAAATTGTACAAGCT | 3303 | AAAAUUGUACAAGCUC |
| intron1 | | G | | CTGTTCATCCACTAG | | UGUUCAUCCACUAG |
| STMN2_ | − | TTTC | 1298 | ATCCTGTCTCCTTGAA | 3304 | AUCCUGUCUCCUUGAA |
| intron1 | | | | AATTGTACAAGCTC | | AAUUGUACAAGCUC |
| STMN2_ | − | ATT | 1299 | CATCCTGTCTCCTTGA | 3305 | CAUCCUGUCUCCUUGA |
| intron1 | | T | | AAATTGTACAAGCT | | AAAUUGUACAAGCU |
| STMN2_ | − | ATT | 1300 | TGACCACTCATTTCAT | 3306 | UGACCACUCAUUUCAU |
| intron1 | | A | | CCTGTCTCCTTGAA | | CCUGUCUCCUUGAA |
| STMN2_ | − | TTTC | 1301 | AGATTATGACCACTCA | 3307 | AGAUUAUGACCACUCA |
| intron1 | | | | TTTCATCCTGTCTC | | UUUCAUCCUGUCUC |
| STMN2_ | − | CTTT | 1302 | CAGATTATGACCACTC | 3308 | CAGAUUAUGACCACUC |
| intron1 | | | | ATTTCATCCTGTCT | | AUUUCAUCCUGUCU |
| STMN2_ | − | ATT | 1303 | TAATAACAATGTAAT | 3309 | UAAUAACAAUGUAAUA |
| intron1 | | A | | AAAACTGAGAAGTAA | | AAACUGAGAAGUAA |
| STMN2_ | − | GTT | 1304 | TACTCGCTAAGCTGCA | 3310 | UACUCGCUAAGCUGCA |
| intron1 | | T | | TGTTCTCTGCAGGT | | UGUUCUCUGCAGGU |
| STMN2_ | − | TTT | 1305 | GTACACCTCCTCAGTA | 3311 | GUACACCUCCUCAGUA |
| intron1 | | G | | TCACATACCTGCCT | | UCACAUACCUGCCU |
| STMN2_ | − | TTTT | 1306 | GGTACACCTCCTCAGT | 3312 | GGUACACCUCCUCAGU |
| intron1 | | | | ATCACATACCTGCC | | AUCACAUACCUGCC |
| STMN2_ | − | ATT | 1307 | CATAAAATGTAATCA | 3313 | CAUAAAAUGUAAUCAA |
| intron1 | | A | | AAAAATAATTCTATC | | AAAAUAAUUCUAUC |
| STMN2_ | − | ATT | 1308 | GAATTACATAAAATG | 3314 | GAAUUACAUAAAAUGU |
| intron1 | | A | | TAATCAAAAAATAAT | | AAUCAAAAAAUAAU |
| STMN2_ | − | TTT | 1309 | TAGCTGGATTAGAATT | 3315 | UAGCUGGAUUAGAAUU |
| intron1 | | A | | ACATAAAATGTAAT | | ACAUAAAAUGUAAU |
| STMN2_ | − | TTTT | 1310 | ATAGCTGGATTAGAA | 3316 | AUAGCUGGAUUAGAAU |
| intron1 | | | | TTACATAAAATGTAA | | UACAUAAAAUGUAA |
| STMN2_ | − | ATT | 1311 | TATAGCTGGATTAGA | 3317 | UAUAGCUGGAUUAGAA |
| intron1 | | T | | ATTACATAAAATGTA | | UUACAUAAAAUGUA |
| STMN2_ | − | ATT | 1312 | AATATTTTATAGCTGG | 3318 | AAUAUUUUAUAGCUGG |
| intron1 | | A | | ATTAGAATTACATA | | AUUAGAAUUACAUA |
| STMN2_ | − | TTT | 1313 | AGGAACACAGTAATA | 3319 | AGGAACACAGUAAUAU |
| intron1 | | G | | TGACACTATTAAATA | | GACACUAUUAAAUA |
| STMN2_ | − | GTT | 1314 | GAGGAACACAGTAAT | 3320 | GAGGAACACAGUAAUA |
| intron1 | | T | | ATGACACTATTAAAT | | UGACACUAUUAAAU |
| STMN2_ | − | ATT | 1315 | ATATGCACATCAAAG | 3321 | AUAUGCACAUCAAAGU |
| intron1 | | C | | TTTGAGGAACACAGT | | UUGAGGAACACAGU |
| STMN2_ | − | TTT | 1316 | ATGAAAATCAAAGGT | 3322 | AUGAAAAUCAAAGGUA |
| intron1 | | A | | AATTCATATGCACAT | | AUUCAUAUGCACAU |
| STMN2_ | − | TTTT | 1317 | AATGAAAATCAAAGG | 3323 | AAUGAAAAUCAAAGGU |
| intron1 | | | | TAATTCATATGCACA | | AAUUCAUAUGCACA |
| STMN2_ | − | ATT | 1318 | TAATGAAAATCAAAG | 3324 | UAAUGAAAAUCAAAGG |
| intron1 | | T | | GTAATTCATATGCAC | | UAAUUCAUAUGCAC |
| STMN2_ | − | TTT | 1319 | CATTTTAATGAAAATC | 3325 | CAUUUUAAUGAAAAUC |
| intron1 | | G | | AAAGGTAATTCATA | | AAAGGUAAUUCAUA |
| STMN2_ | − | ATT | 1320 | GCATTTTAATGAAAAT | 3326 | GCAUUUUAAUGAAAAU |
| intron1 | | T | | CAAAGGTAATTCAT | | CAAAGGUAAUUCAU |
| STMN2_ | − | ATT | 1321 | AATCAGAATTTGCATT | 3327 | AAUCAGAAUUUGCAUU |
| intron1 | | G | | TTAATGAAAATCAA | | UUAAUGAAAAUCAA |
| STMN2_ | − | GTT | 1322 | GGAAGACAGAATGTC | 3328 | GGAAGACAGAAUGUCU |
| intron1 | | C | | TGCCTCAAGCCAGAT | | GCCUCAAGCCAGAU |
| STMN2_ | − | CTT | 1323 | TTCGGAAGACAGAAT | 3329 | UUCGGAAGACAGAAUG |
| intron1 | | G | | GTCTGCCTCAAGCCA | | UCUGCCUCAAGCCA |
| STMN2_ | − | TTT | 1324 | GTGGTCAGAATCAGC | 3330 | GUGGUCAGAAUCAGCA |
| intron1 | | A | | ATCATCTGGGAGCTT | | UCAUCUGGGAGCUU |
| STMN2_ | − | GTT | 1325 | AGTGGTCAGAATCAG | 3331 | AGUGGUCAGAAUCAGC |
| intron1 | | T | | CATCATCTGGGAGCT | | AUCAUCUGGGAGCU |
| STMN2_ | − | GTT | 1326 | ATATCCCTAAAACTGA | 3332 | AUAUCCCUAAAACUGA |
| intron1 | | A | | TGTGTTTAGTGGTC | | UGUGUUUAGUGGUC |
| STMN2_ | − | ATT | 1327 | CAAGTTAATATCCCTA | 3333 | CAAGUUAAUAUCCCUA |
| intron1 | | A | | AAACTGATGTGTTT | | AAACUGAUGUGUUU |
| STMN2_ | − | CTT | 1328 | CCAGGAGGGATACCT | 3334 | CCAGGAGGGAUACCUG |
| intron1 | | A | | GTATATTACAAGTTA | | UAUAUUACAAGUUA |
| STMN2_ | − | GTT | 1329 | AGACATAATACCAGA | 3335 | AGACAUAAUACCAGAG |
| intron1 | | A | | GCTTACCAGGAGGGA | | CUUACCAGGAGGGA |
| STMN2_ | − | TTT | 1330 | AAAATGTTAAGACAT | 3336 | AAAAUGUUAAGACAUA |
| intron1 | | A | | AATACCAGAGCTTAC | | AUACCAGAGCUUAC |
| STMN2_ | − | ATT | 1331 | AAAAATGTTAAGACA | 3337 | AAAAAUGUUAAGACAU |
| intron1 | | T | | TAATACCAGAGCTTA | | AAUACCAGAGCUUA |
| STMN2_ | − | ATT | 1332 | CCATAGATTTAAAAAT | 3338 | CCAUAGAUUUAAAAAU |
| intron1 | | A | | GTTAAGACATAATA | | GUUAAGACAUAAUA |
| STMN2_ | − | TTT | 1333 | TAAAGATTACCATAG | 3339 | UAAAGAUUACCAUAGA |
| intron1 | | G | | ATTTAAAAATGTTAA | | UUUAAAAAUGUUAA |
| STMN2_ | − | ATT | 1334 | TATCAATGCATATTTA | 3340 | UAUCAAUGCAUAUUUA |
| intron1 | | C | | AAAAATCCACTTTT | | AAAAAUCCACUUUU |
| STMN2_ | − | ATT | 1335 | AAAAAATCCACTTTTG | 3341 | AAAAAAUCCACUUUUG |
| intron1 | | T | | ATGATACCCAAAAT | | AUGAUACCCAAAAU |
| STMN2_ | − | TTT | 1336 | AAAAATCCACTTTTGA | 3342 | AAAAAUCCACUUUUGA |
| intron1 | | A | | TGATACCCAAAATT | | UGAUACCCAAAAUU |
| STMN2_ | − | CTTT | 1337 | TGATGATACCCAAAA | 3343 | UGAUGAUACCCAAAAU |
| intron1 | | | | TTAGTTTATACTTAT | | UAGUUUAUACUUAU |
| STMN2_ | − | TTTT | 1338 | TGGTACACCTCCTCAG | 3344 | UGGUACACCUCCUCAG |
| intron1 | | | | TATCACATACCTGC | | UAUCACAUACCUGC |
| STMN2_ | − | GTT | 1339 | TTGGTACACCTCCTCA | 3345 | UUGGUACACCUCCUCA |
| intron1 | | T | | GTATCACATACCTG | | GUAUCACAUACCUG |
| STMN2_ | − | CTT | 1340 | GAAGATGGGAAAAAT | 3346 | GAAGAUGGGAAAAAUA |
| intron1 | | A | | AACAGCAGTCAGTTT | | ACAGCAGUCAGUUU |
| STMN2_ | − | TTT | 1341 | AATGGAAAAGAAAGA | 3347 | AAUGGAAAAGAAAGAC |
| intron1 | | A | | CAGACTTAGAAGATG | | AGACUUAGAAGAUG |
| STMN2_ | − | CTTT | 1342 | AAATGGAAAAGAAAG | 3348 | AAAUGGAAAAGAAAGA |
| intron1 | | | | ACAGACTTAGAAGAT | | CAGACUUAGAAGAU |
| STMN2_ | − | TTT | 1343 | AAAAGGTATCTTTAA | 3349 | AAAAGGUAUCUUUAAA |
| intron1 | | A | | ATGGAAAAGAAAGAC | | UGGAAAAGAAAGAC |
| STMN2_ | − | ATT | 1344 | AAAAAGGTATCTTTA | 3350 | AAAAAGGUAUCUUUAA |
| intron1 | | T | | AATGGAAAAGAAAGA | | AUGGAAAAGAAAGA |
| STMN2_ | − | ATT | 1345 | GATTTAAAAAGGTAT | 3351 | GAUUUAAAAAGGUAUC |
| intron1 | | A | | CTTTAAATGGAAAAG | | UUUAAAUGGAAAAG |
| STMN2_ | − | ATT | 1346 | GATTAGATTTAAAAA | 3352 | GAUUAGAUUUAAAAAG |
| intron1 | | G | | GGTATCTTTAAATGG | | GUAUCUUUAAAUGG |
| STMN2_ | − | ATT | 1347 | AAATCACATTGGATTA | 3353 | AAAUCACAUUGGAUUA |
| intron1 | | G | | GATTTAAAAAGGTA | | GAUUUAAAAAGGUA |
| STMN2_ | − | GTT | 1348 | AAATCTGATAAAACT | 3354 | AAAUCUGAUAAAACUA |
| intron1 | | G | | AGATTGAAATCACAT | | GAUUGAAAUCACAU |
| STMN2_ | − | ATT | 1349 | TTGAAATCTGATAAA | 3355 | UUGAAAUCUGAUAAAA |
| intron1 | | G | | ACTAGATTGAAATCA | | CUAGAUUGAAAUCA |
| STMN2_ | − | TTTC | 1350 | TAATAAACAGAAAAC | 3356 | UAAUAAACAGAAAACC |
| intron1 | | | | CACTACAAGGAGATG | | ACUACAAGGAGAUG |
| STMN2_ | − | GTT | 1351 | ATGCAGACACCGAGG | 3357 | AUGCAGACACCGAGGU |
| intron1 | | A | | TTTTCCAATGGACAG | | UUUCCAAUGGACAG |
| STMN2_ | − | TTTT | 1352 | CTAATAAACAGAAAA | 3358 | CUAAUAAACAGAAAAC |
| intron1 | | | | CCACTACAAGGAGAT | | CACUACAAGGAGAU |
| STMN2_ | − | ATT | 1353 | ACATCGATTTTCTAAT | 3359 | ACAUCGAUUUUCUAAU |
| intron1 | | A | | AAACAGAAAACCAC | | AAACAGAAAACCAC |
| STMN2_ | − | GTT | 1354 | AAATTAACATCGATTT | 3360 | AAAUUAACAUCGAUUU |
| intron1 | | A | | TCTAATAAACAGAA | | UCUAAUAAACAGAA |
| STMN2_ | − | CTT | 1355 | GTTAAAATTAACATCG | 3361 | GUUAAAAUUAACAUCG |
| intron1 | | C | | ATTTTCTAATAAAC | | AUUUUCUAAUAAAC |
| STMN2_ | − | CTT | 1356 | CTTCGTTAAAATTAAC | 3362 | CUUCGUUAAAAUUAAC |
| intron1 | | A | | ATCGATTTTCTAAT | | AUCGAUUUUCUAAU |
| STMN2_ | − | CTT | 1357 | TTACTTCGTTAAAATT | 3363 | UUACUUCGUUAAAAUU |
| intron1 | | C | | AACATCGATTTTCT | | AACAUCGAUUUUCU |
| STMN2_ | − | TTTC | 1358 | TTCTTACTTCGTTAAA | 3364 | UUCUUACUUCGUUAAA |
| intron1 | | | | ATTAACATCGATTT | | AUUAACAUCGAUUU |
| STMN2_ | − | ATT | 1359 | CTTCTTACTTCGTTAA | 3365 | CUUCUUACUUCGUUAA |
| intron1 | | T | | AATTAACATCGATT | | AAUUAACAUCGAUU |
| STMN2_ | − | CTT | 1360 | TATATTTCTTCTTACTT | 3366 | UAUAUUUCUUCUUACU |
| intron1 | | A | | CGTTAAAATTAAC | | UCGUUAAAAUUAAC |
| STMN2_ | − | TTT | 1361 | TACTTATATATTTCTT | 3367 | UACUUAUAUAUUUCUU |
| intron1 | | A | | CTTACTTCGTTAAA | | CUUACUUCGUUAAA |
| STMN2_ | − | GTT | 1362 | ATACTTATATATTTCT | 3368 | AUACUUAUAUAUUUCU |
| intron1 | | T | | TCTTACTTCGTTAA | | UCUUACUUCGUUAA |
| STMN2_ | − | ATT | 1363 | GTTTATACTTATATAT | 3369 | GUUUAUACUUAUAUAU |
| intron1 | | A | | TTCTTCTTACTTCG | | UUCUUCUUACUUCG |
| STMN2_ | − | TTT | 1364 | ATGATACCCAAAATT | 3370 | AUGAUACCCAAAAUUA |
| intron1 | | G | | AGTTTATACTTATAT | | GUUUAUACUUAUAU |
| STMN2_ | − | TTTT | 1365 | GATGATACCCAAAAT | 3371 | GAUGAUACCCAAAAUU |
| intron1 | | | | TAGTTTATACTTATA | | AGUUUAUACUUAUA |
| STMN2_ | − | ATT | 1366 | TCTAATAAACAGAAA | 3372 | UCUAAUAAACAGAAAA |
| intron1 | | T | | ACCACTACAAGGAGA | | CCACUACAAGGAGA |
| STMN2_ | − | GTT | 1367 | TCCAATGGACAGAAC | 3373 | UCCAAUGGACAGAACC |
| intron1 | | T | | CAGTCTAGGTTCTGA | | AGUCUAGGUUCUGA |
| STMN2_ | − | TTTT | 1368 | CCAATGGACAGAACC | 3374 | CCAAUGGACAGAACCA |
| intron1 | | | | AGTCTAGGTTCTGAA | | GUCUAGGUUCUGAA |
| STMN2_ | − | TTTC | 1369 | CAATGGACAGAACCA | 3375 | CAAUGGACAGAACCAG |
| intron1 | | | | GTCTAGGTTCTGAAA | | UCUAGGUUCUGAAA |
| STMN2_ | − | TTTT | 1370 | AGAATAGAATAATTT | 3376 | AGAAUAGAAUAAUUUA |
| intron1 | | | | ACTACAAATCTGTAA | | CUACAAAUCUGUAA |
| STMN2_ | − | CTTT | 1371 | TAGAATAGAATAATTT | 3377 | UAGAAUAGAAUAAUUU |
| intron1 | | | | ACTACAAATCTGTA | | ACUACAAAUCUGUA |
| STMN2_ | − | TTTC | 1372 | TCTTTTAGAATAGAAT | 3378 | UCUUUUAGAAUAGAAU |
| intron1 | | | | AATTTACTACAAAT | | AAUUUACUACAAAU |
| STMN2_ | − | ATT | 1373 | CTCTTTTAGAATAGAA | 3379 | CUCUUUUAGAAUAGAA |
| intron1 | | T | | TAATTTACTACAAA | | UAAUUUACUACAAA |
| STMN2_ | − | ATT | 1374 | ATGAGGTAATAGCTG | 3380 | AUGAGGUAAUAGCUGU |
| intron1 | | A | | TAACAATAAAAACAC | | AACAAUAAAAACAC |
| STMN2_ | − | TTT | 1375 | CTAAAAATATTAATG | 3381 | CUAAAAAUAUUAAUGA |
| intron1 | | G | | AGGTAATAGCTGTAA | | GGUAAUAGCUGUAA |
| STMN2_ | − | GTT | 1376 | GCTAAAAATATTAAT | 3382 | GCUAAAAAUAUUAAUG |
| intron1 | | T | | GAGGTAATAGCTGTA | | AGGUAAUAGCUGUA |
| STMN2_ | − | TTTC | 1377 | AATGCAACAAATAAA | 3383 | AAUGCAACAAAUAAAA |
| intron1 | | | | AGTTTGCTAAAAATA | | GUUUGCUAAAAAUA |
| STMN2_ | − | CTTT | 1378 | CAATGCAACAAATAA | 3384 | CAAUGCAACAAAUAAA |
| intron1 | | | | AAGTTTGCTAAAAAT | | AGUUUGCUAAAAAU |
| STMN2_ | − | ATT | 1379 | AAACTGCTTTCAATGC | 3385 | AAACUGCUUUCAAUGC |
| intron1 | | A | | AACAAATAAAAGTT | | AACAAAUAAAAGUU |
| STMN2_ | − | TTT | 1380 | AAAAATAAAAACCCA | 3386 | AAAAAUAAAAACCCAA |
| intron1 | | G | | AAGTAATTAAAACTG | | AGUAAUUAAAACUG |
| STMN2_ | − | ATT | 1381 | GAAAAATAAAAACCC | 3387 | GAAAAAUAAAAACCCA |
| intron1 | | T | | AAAGTAATTAAAACT | | AAGUAAUUAAAACU |
| STMN2_ | − | ATT | 1382 | GTAATTTGAAAAATA | 3388 | GUAAUUUGAAAAAUAA |
| intron1 | | A | | AAAACCCAAAGTAAT | | AAACCCAAAGUAAU |
| STMN2_ | − | ATT | 1383 | CACCATCTATCCATTA | 3389 | CACCAUCUAUCCAUUA |
| intron1 | | C | | GTAATTTGAAAAAT | | GUAAUUUGAAAAAU |
| STMN2_ | − | CTT | 1384 | TTCCACCATCTATCCA | 3390 | UUCCACCAUCUAUCCA |
| intron1 | | A | | TTAGTAATTTGAAA | | UUAGUAAUUUGAAA |
| STMN2_ | − | ATT | 1385 | AATGCTTATTCCACCA | 3391 | AAUGCUUAUUCCACCA |
| intron1 | | A | | TCTATCCATTAGTA | | UCUAUCCAUUAGUA |
| STMN2_ | − | ATT | 1386 | TGCCAAATGATTAAAT | 3392 | UGCCAAAUGAUUAAAU |
| intron1 | | G | | GCTTATTCCACCAT | | GCUUAUUCCACCAU |
| STMN2_ | − | TTT | 1387 | ATGGAAGTCATATTGT | 3393 | AUGGAAGUCAUAUUGU |
| intron1 | | G | | GCCAAATGATTAAA | | GCCAAAUGAUUAAA |
| STMN2_ | − | ATT | 1388 | GATGGAAGTCATATT | 3394 | GAUGGAAGUCAUAUUG |
| intron1 | | T | | GTGCCAAATGATTAA | | UGCCAAAUGAUUAA |
| STMN2_ | − | TTT | 1389 | ATCACTGAGAATGAG | 3395 | AUCACUGAGAAUGAGC |
| intron1 | | A | | CTATTTGATGGAAGT | | UAUUUGAUGGAAGU |
| STMN2_ | − | TTTT | 1390 | AATCACTGAGAATGA | 3396 | AAUCACUGAGAAUGAG |
| intron1 | | | | GCTATTTGATGGAAG | | CUAUUUGAUGGAAG |
| STMN2_ | − | TTTT | 1391 | TAATCACTGAGAATG | 3397 | UAAUCACUGAGAAUGA |
| intron1 | | | | AGCTATTTGATGGAA | | GCUAUUUGAUGGAA |
| STMN2_ | − | TTTT | 1392 | TTAATCACTGAGAATG | 3398 | UUAAUCACUGAGAAUG |
| intron1 | | | | AGCTATTTGATGGA | | AGCUAUUUGAUGGA |
| STMN2_ | − | ATT | 1393 | TTTAATCACTGAGAAT | 3399 | UUUAAUCACUGAGAAU |
| intron1 | | T | | GAGCTATTTGATGG | | GAGCUAUUUGAUGG |
| STMN2_ | − | CTT | 1394 | TAGCATTTTTTAATCA | 3400 | UAGCAUUUUUUAAUCA |
| intron1 | | G | | CTGAGAATGAGCTA | | CUGAGAAUGAGCUA |
| STMN2_ | − | ATT | 1395 | TAGCCTCTTGTAGCAT | 3401 | UAGCCUCUUGUAGCAU |
| intron1 | | G | | TTTTTAATCACTGA | | UUUUUAAUCACUGA |
| STMN2_ | − | TTTC | 1396 | CTGAATCTGAGTAAAT | 3402 | CUGAAUCUGAGUAAAU |
| intron1 | | | | TGTAGCCTCTTGTA | | UGUAGCCUCUUGUA |
| STMN2_ | − | TTT | 1397 | GAATAGAATAATTTA | 3403 | GAAUAGAAUAAUUUAC |
| intron1 | | A | | CTACAAATCTGTAAG | | UACAAAUCUGUAAG |
| STMN2_ | − | ATT | 1398 | ACTACAAATCTGTAA | 3404 | ACUACAAAUCUGUAAG |
| intron1 | | T | | GTCACATTATTGTAA | | UCACAUUAUUGUAA |
| STMN2_ | − | TTT | 1399 | CTACAAATCTGTAAGT | 3405 | CUACAAAUCUGUAAGU |
| intron1 | | A | | CACATTATTGTAAA | | CACAUUAUUGUAAA |
| STMN2_ | − | ATT | 1400 | TTGTAAAAAAAAACC | 3406 | UUGUAAAAAAAAACCA |
| intron1 | | A | | ATTGTGAATTTTGAC | | UUGUGAAUUUUGAC |
| STMN2_ | − | CTT | 1401 | CTCACCTGGTATAAAC | 3407 | CUCACCUGGUAUAAAC |
| intron1 | | A | | TAAATACATGAGAT | | UAAAUACAUGAGAU |
| STMN2_ | − | ATT | 1402 | CAGGCTCAGCTTACTC | 3408 | CAGGCUCAGCUUACUC |
| intron1 | | G | | ACCTGGTATAAACT | | ACCUGGUAUAAACU |
| STMN2_ | − | TTT | 1403 | TTGCAGGCTCAGCTTA | 3409 | UUGCAGGCUCAGCUUA |
| intron1 | | A | | CTCACCTGGTATAA | | CUCACCUGGUAUAA |
| STMN2_ | − | GTT | 1404 | ATTGCAGGCTCAGCTT | 3410 | AUUGCAGGCUCAGCUU |
| intron1 | | T | | ACTCACCTGGTATA | | ACUCACCUGGUAUA |
| STMN2_ | − | GTT | 1405 | CACTGGGACAGAGAG | 3411 | CACUGGGACAGAGAGU |
| intron1 | | A | | TGTTTATTGCAGGCT | | GUUUAUUGCAGGCU |
| STMN2_ | − | ATT | 1406 | TAGCTACCTGCGACGT | 3412 | UAGCUACCUGCGACGU |
| intron1 | | C | | GTTACACTGGGACA | | GUUACACUGGGACA |
| STMN2_ | − | TTT | 1407 | TCCTATCATTCTAGCT | 3413 | UCCUAUCAUUCUAGCU |
| intron1 | | A | | ACCTGCGACGTGTT | | ACCUGCGACGUGUU |
| STMN2_ | − | ATT | 1408 | ATCCTATCATTCTAGC | 3414 | AUCCUAUCAUUCUAGC |
| intron1 | | T | | TACCTGCGACGTGT | | UACCUGCGACGUGU |
| STMN2_ | − | ATT | 1409 | ATTTATCCTATCATTC | 3415 | AUUUAUCCUAUCAUUC |
| intron1 | | A | | TAGCTACCTGCGAC | | UAGCUACCUGCGAC |
| STMN2_ | − | TTT | 1410 | ACGTGCATAGACAAA | 3416 | ACGUGCAUAGACAAAC |
| intron1 | | A | | CACCACAAGGTCTAT | | ACCACAAGGUCUAU |
| STMN2_ | − | TTTT | 1411 | AACGTGCATAGACAA | 3417 | AACGUGCAUAGACAAA |
| intron1 | | | | ACACCACAAGGTCTA | | CACCACAAGGUCUA |
| STMN2_ | − | ATT | 1412 | TAACGTGCATAGACA | 3418 | UAACGUGCAUAGACAA |
| intron1 | | T | | AACACCACAAGGTCT | | ACACCACAAGGUCU |
| STMN2_ | − | TTTC | 1413 | TCTCAGAGAATTTTAA | 3419 | UCUCAGAGAAUUUUAA |
| intron1 | | | | CGTGCATAGACAAA | | CGUGCAUAGACAAA |
| STMN2_ | − | ATT | 1414 | CCTGAATCTGAGTAA | 3420 | CCUGAAUCUGAGUAAA |
| intron1 | | T | | ATTGTAGCCTCTTGT | | UUGUAGCCUCUUGU |
| STMN2_ | − | CTTT | 1415 | CTCTCAGAGAATTTTA | 3421 | CUCUCAGAGAAUUUUA |
| intron1 | | | | ACGTGCATAGACAA | | ACGUGCAUAGACAA |
| STMN2_ | − | TTTT | 1416 | AAAATATACTTTCTCT | 3422 | AAAAUAUACUUUCUCU |
| intron1 | | | | CAGAGAATTTTAAC | | CAGAGAAUUUUAAC |
| STMN2_ | − | ATT | 1417 | TAAAATATACTTTCTC | 3423 | UAAAAUAUACUUUCUC |
| intron1 | | T | | TCAGAGAATTTTAA | | UCAGAGAAUUUUAA |
| STMN2_ | − | ATT | 1418 | TCATTTTAAAATATAC | 3424 | UCAUUUUAAAAUAUAC |
| intron1 | | A | | TTTCTCTCAGAGAA | | UUUCUCUCAGAGAA |
| STMN2_ | − | CTT | 1419 | ATTATCATTTTAAAAT | 3425 | AUUAUCAUUUUAAAAU |
| intron1 | | A | | ATACTTTCTCTCAG | | AUACUUUCUCUCAG |
| STMN2_ | − | TTT | 1420 | ATAGCACAAATGTCC | 3426 | AUAGCACAAAUGUCCA |
| intron1 | | A | | AATCTTAATTATCAT | | AUCUUAAUUAUCAU |
| STMN2_ | − | TTTT | 1421 | AATAGCACAAATGTC | 3427 | AAUAGCACAAAUGUCC |
| intron1 | | | | CAATCTTAATTATCA | | AAUCUUAAUUAUCA |
| STMN2_ | − | ATT | 1422 | TAATAGCACAAATGT | 3428 | UAAUAGCACAAAUGUC |
| intron1 | | T | | CCAATCTTAATTATC | | CAAUCUUAAUUAUC |
| STMN2_ | − | GTT | 1423 | TAGATTTTAATAGCAC | 3429 | UAGAUUUUAAUAGCAC |
| intron1 | | G | | AAATGTCCAATCTT | | AAAUGUCCAAUCUU |
| STMN2_ | − | TTT | 1424 | ACTAAAGTTGTAGATT | 3430 | ACUAAAGUUGUAGAUU |
| intron1 | | G | | TTAATAGCACAAAT | | UUAAUAGCACAAAU |
| STMN2_ | − | TTTT | 1425 | GACTAAAGTTGTAGA | 3431 | GACUAAAGUUGUAGAU |
| intron1 | | | | TTTTAATAGCACAAA | | UUUAAUAGCACAAA |
| STMN2_ | − | ATT | 1426 | TGACTAAAGTTGTAG | 3432 | UGACUAAAGUUGUAGA |
| intron1 | | T | | ATTTTAATAGCACAA | | UUUUAAUAGCACAA |
| STMN2_ | − | ATT | 1427 | TGAATTTTGACTAAAG | 3433 | UGAAUUUUGACUAAAG |
| intron1 | | G | | TTGTAGATTTTAAT | | UUGUAGAUUUUAAU |
| STMN2_ | − | ATT | 1428 | TAAAAAAAAACCATT | 3434 | UAAAAAAAAACCAUUG |
| intron1 | | G | | GTGAATTTTGACTAA | | UGAAUUUUGACUAA |
| STMN2_ | − | TTT | 1429 | AAATATACTTTCTCTC | 3435 | AAAUAUACUUUCUCUC |
| intron1 | | A | | AGAGAATTTTAACG | | AGAGAAUUUUAACG |
| STMN2_ | − | ATT | 1430 | ATAAACTACTGCCATT | 3436 | AUAAACUACUGCCAUU |
| intron1 | | G | | TCTTTCAGTTTTAT | | UCUUUCAGUUUUAU |
| STMN2_ | − | CTT | 1431 | TGGCACTCTGAAAGG | 3437 | UGGCACUCUGAAAGGA |
| intron1 | | A | | ACATTTCCTGAATCT | | CAUUUCCUGAAUCU |
| STMN2_ | − | TTT | 1432 | TTATATGAATCAGCCT | 3438 | UUAUAUGAAUCAGCCU |
| intron1 | | A | | TATGGCACTCTGAA | | UAUGGCACUCUGAA |
| STMN2_ | − | CTTT | 1433 | TTTCAGCCTCCTGTGA | 3439 | UUUCAGCCUCCUGUGA |
| intron1 | | | | GCAATGAGCTACCA | | GCAAUGAGCUACCA |
| STMN2_ | − | CTT | 1434 | CTCCTGCTCGGAGGCC | 3440 | CUCCUGCUCGGAGGCC |
| intron1 | | C | | AGCTTTTTTCAGCC | | AGCUUUUUUCAGCC |
| STMN2_ | − | TTT | 1435 | TGCTCTGAGCTTCCTC | 3441 | UGCUCUGAGCUUCCUC |
| intron1 | | G | | CTGCTCGGAGGCCA | | CUGCUCGGAGGCCA |
| STMN2_ | − | GTT | 1436 | GTGCTCTGAGCTTCCT | 3442 | GUGCUCUGAGCUUCCU |
| intron1 | | T | | CCTGCTCGGAGGCC | | CCUGCUCGGAGGCC |
| STMN2_ | − | GTT | 1437 | GCTATCAGCAGCTCCC | 3443 | GCUAUCAGCAGCUCCC |
| intron1 | | C | | AGTGGCCACGCCCA | | AGUGGCCACGCCCA |
| STMN2_ | − | CTT | 1438 | CCACGACCAAAAAAG | 3444 | CCACGACCAAAAAAGA |
| intron1 | | C | | AAACTGGTGTGAGCT | | AACUGGUGUGAGCU |
| STMN2_ | − | TTTC | 1439 | TTCCCACGACCAAAA | 3445 | UUCCCACGACCAAAAA |
| intron1 | | | | AAGAAACTGGTGTGA | | AGAAACUGGUGUGA |
| STMN2_ | − | TTTT | 1440 | CTTCCCACGACCAAAA | 3446 | CUUCCCACGACCAAAA |
| intron1 | | | | AAGAAACTGGTGTG | | AAGAAACUGGUGUG |
| STMN2_ | − | TTTT | 1441 | TCTTCCCACGACCAAA | 3447 | UCUUCCCACGACCAAA |
| intron1 | | | | AAAGAAACTGGTGT | | AAAGAAACUGGUGU |
| STMN2_ | − | GTT | 1442 | TTCTTCCCACGACCAA | 3448 | UUCUUCCCACGACCAA |
| intron1 | | T | | AAAAGAAACTGGTG | | AAAAGAAACUGGUG |
| STMN2_ | − | CTT | 1443 | TGACAACAGGATAAT | 3449 | UGACAACAGGAUAAUA |
| intron1 | | G | | ATGTGTTTTTCTTCC | | UGUGUUUUUCUUCC |
| STMN2_ | − | TTTC | 1444 | ATATAAGGTCACAGA | 3450 | AUAUAAGGUCACAGAU |
| intron1 | | | | TCTTGTGACAACAGG | | CUUGUGACAACAGG |
| STMN2_ | − | TTTT | 1445 | CATATAAGGTCACAG | 3451 | CAUAUAAGGUCACAGA |
| intron1 | | | | ATCTTGTGACAACAG | | UCUUGUGACAACAG |
| STMN2_ | − | TTTT | 1446 | TCATATAAGGTCACA | 3452 | UCAUAUAAGGUCACAG |
| intron1 | | | | GATCTTGTGACAACA | | AUCUUGUGACAACA |
| STMN2_ | − | TTTT | 1447 | TTCATATAAGGTCACA | 3453 | UUCAUAUAAGGUCACA |
| intron1 | | | | GATCTTGTGACAAC | | GAUCUUGUGACAAC |
| STMN2_ | − | ATT | 1448 | TTTCATATAAGGTCAC | 3454 | UUUCAUAUAAGGUCAC |
| intron1 | | T | | AGATCTTGTGACAA | | AGAUCUUGUGACAA |
| STMN2_ | − | ATT | 1449 | TAGCATTTTTTCATAT | 3455 | UAGCAUUUUUUCAUAU |
| intron1 | | C | | AAGGTCACAGATCT | | AAGGUCACAGAUCU |
| STMN2_ | − | TTT | 1450 | ATGAAAAAATTCTAG | 3456 | AUGAAAAAAUUCUAGC |
| intron1 | | A | | CATTTTTTCATATAA | | AUUUUUUCAUAUAA |
| STMN2_ | − | TTTT | 1451 | AATGAAAAAATTCTA | 3457 | AAUGAAAAAAUUCUAG |
| intron1 | | | | GCATTTTTTCATATA | | CAUUUUUUCAUAUA |
| STMN2_ | − | TTTT | 1452 | TAATGAAAAAATTCT | 3458 | UAAUGAAAAAAUUCUA |
| intron1 | | | | AGCATTTTTTCATAT | | GCAUUUUUUCAUAU |
| STMN2_ | − | TTTT | 1453 | TTAATGAAAAAATTCT | 3459 | UUAAUGAAAAAAUUCU |
| intron1 | | | | AGCATTTTTTCATA | | AGCAUUUUUUCAUA |
| STMN2_ | − | CTTT | 1454 | TTTAATGAAAAAATTC | 3460 | UUUAAUGAAAAAAUUC |
| intron1 | | | | TAGCATTTTTTCAT | | UAGCAUUUUUUCAU |
| STMN2_ | − | TTTC | 1455 | TTTTTTAATGAAAAAA | 3461 | UUUUUUAAUGAAAAAA |
| intron1 | | | | TTCTAGCATTTTTT | | UUCUAGCAUUUUUU |
| STMN2_ | − | TTTT | 1456 | CTTTTTTAATGAAAAA | 3462 | CUUUUUUAAUGAAAAA |
| intron1 | | | | ATTCTAGCATTTTT | | AUUCUAGCAUUUUU |
| STMN2_ | − | ATT | 1457 | TCTTTTTTAATGAAAA | 3463 | UCUUUUUUAAUGAAAA |
| intron1 | | T | | AATTCTAGCATTTT | | AAUUCUAGCAUUUU |
| STMN2_ | − | GTT | 1458 | AGTATTTTCTTTTTTA | 3464 | AGUAUUUUCUUUUUUA |
| intron1 | | C | | ATGAAAAAATTCTA | | AUGAAAAAAUUCUA |
| STMN2_ | − | GTT | 1459 | TGAAAACATCTGGGT | 3465 | UGAAAACAUCUGGGUC |
| intron1 | | C | | CACTGGCTAGTTCAG | | ACUGGCUAGUUCAG |
| STMN2_ | − | TTTT | 1460 | TTCAGCCTCCTGTGAG | 3466 | UUCAGCCUCCUGUGAG |
| intron1 | | | | CAATGAGCTACCAA | | CAAUGAGCUACCAA |
| STMN2_ | − | TTTT | 1461 | TCAGCCTCCTGTGAGC | 3467 | UCAGCCUCCUGUGAGC |
| intron1 | | | | AATGAGCTACCAAG | | AAUGAGCUACCAAG |
| STMN2_ | − | TTTT | 1462 | CAGCCTCCTGTGAGCA | 3468 | CAGCCUCCUGUGAGCA |
| intron1 | | | | ATGAGCTACCAAGG | | AUGAGCUACCAAGG |
| STMN2_ | − | TTTC | 1463 | AGCCTCCTGTGAGCAA | 3469 | AGCCUCCUGUGAGCAA |
| intron1 | | | | TGAGCTACCAAGGT | | UGAGCUACCAAGGU |
| STMN2_ | − | TTTT | 1464 | ATTATATGAATCAGCC | 3470 | AUUAUAUGAAUCAGCC |
| intron1 | | | | TTATGGCACTCTGA | | UUAUGGCACUCUGA |
| STMN2_ | − | ATT | 1465 | TATTATATGAATCAGC | 3471 | UAUUAUAUGAAUCAGC |
| intron1 | | T | | CTTATGGCACTCTG | | CUUAUGGGACUCUG |
| STMN2_ | − | ATT | 1466 | TAGGGAAGAAAACTA | 3472 | UAGGGAAGAAAACUAU |
| intron1 | | A | | TTTTATTATATGAAT | | UUUAUUAUAUGAAU |
| STMN2_ | − | CTT | 1467 | AATTATAGGGAAGAA | 3473 | AAUUAUAGGGAAGAAA |
| intron1 | | A | | AACTATTTTATTATA | | ACUAUUUUAUUAUA |
| STMN2_ | − | TTT | 1468 | ATCTTAAATTATAGGG | 3474 | AUCUUAAAUUAUAGGG |
| intron1 | | G | | AAGAAAACTATTTT | | AAGAAAACUAUUUU |
| STMN2_ | − | ATT | 1469 | GATCTTAAATTATAGG | 3475 | GAUCUUAAAUUAUAGG |
| intron1 | | T | | GAAGAAAACTATTT | | GAAGAAAACUAUUU |
| STMN2_ | − | ATT | 1470 | ACAGAACTAAGTAAC | 3476 | ACAGAACUAAGUAACU |
| intron1 | | C | | TATTTGATCTTAAAT | | AUUUGAUCUUAAAU |
| STMN2_ | − | TTT | 1471 | ATAGCTACTGCTAGGT | 3477 | AUAGCUACUGCUAGGU |
| intron1 | | G | | ATTCACAGAACTAA | | AUUCACAGAACUAA |
| STMN2_ | − | GTT | 1472 | GATAGCTACTGCTAG | 3478 | GAUAGCUACUGCUAGG |
| intron1 | | T | | GTATTCACAGAACTA | | UAUUCACAGAACUA |
| STMN2_ | − | ATT | 1473 | TGTTTGATAGCTACTG | 3479 | UGUUUGAUAGCUACUG |
| intron1 | | C | | CTAGGTATTCACAG | | CUAGGUAUUCACAG |
| STMN2_ | − | TTT | 1474 | AAATTCTGTTTGATAG | 3480 | AAAUUCUGUUUGAUAG |
| intron1 | | A | | CTACTGCTAGGTAT | | CUACUGCUAGGUAU |
| STMN2_ | − | CTTT | 1475 | AAAATTCTGTTTGATA | 3481 | AAAAUUCUGUUUGAUA |
| intron1 | | | | GCTACTGCTAGGTA | | GCUACUGCUAGGUA |
| STMN2_ | − | TTT | 1476 | ACTTTAAAATTCTGTT | 3482 | ACUUUAAAAUUCUGUU |
| intron1 | | A | | TGATAGCTACTGCT | | UGAUAGCUACUGCU |
| STMN2_ | − | ATT | 1477 | TATGAATCAGCCTTAT | 3483 | UAUGAAUCAGCCUUAU |
| intron1 | | A | | GGCACTCTGAAAGG | | GGCACUCUGAAAGG |
| STMN2_ | − | ATT | 1478 | AACTTTAAAATTCTGT | 3484 | AACUUUAAAAUUCUGU |
| intron1 | | T | | TTGATAGCTACTGC | | UUGAUAGCUACUGC |
| STMN2_ | − | GTT | 1479 | GTTGTACAGATTTAAC | 3485 | GUUGUACAGAUUUAAC |
| intron1 | | A | | TTTAAAATTCTGTT | | UUUAAAAUUCUGUU |
| STMN2_ | − | ATT | 1480 | TTAGTTGTACAGATTT | 3486 | UUAGUUGUACAGAUUU |
| intron1 | | G | | AACTTTAAAATTCT | | AACUUUAAAAUUCU |
| STMN2_ | − | CTT | 1481 | ATTGTTAGTTGTACAG | 3487 | AUUGUUAGUUGUACAG |
| intron1 | | C | | ATTTAACTTTAAAA | | AUUUAACUUUAAAA |
| STMN2_ | − | ATT | 1482 | ATCCTCCACTTCATTG | 3488 | AUCCUCCACUUCAUUG |
| intron1 | | C | | TTAGTTGTACAGAT | | UUAGUUGUACAGAU |
| STMN2_ | − | ATT | 1483 | AATATGTATCGATTCA | 3489 | AAUAUGUAUCGAUUCA |
| intron1 | | C | | TCCTCCACTTCATT | | UCCUCCACUUCAUU |
| STMN2_ | − | CTT | 1484 | CATTCAATATGTATCG | 3490 | CAUUCAAUAUGUAUCG |
| intron1 | | C | | ATTCATCCTCCACT | | AUUCAUCCUCCACU |
| STMN2_ | − | TTT | 1485 | TCAATGACAAAGTCTT | 3491 | UCAAUGACAAAGUCUU |
| intron1 | | A | | CCATTCAATATGTA | | CCAUUCAAUAUGUA |
| STMN2_ | − | ATT | 1486 | ATCAATGACAAAGTC | 3492 | AUCAAUGACAAAGUCU |
| intron1 | | T | | TTCCATTCAATATGT | | UCCAUUCAAUAUGU |
| STMN2_ | − | TTTC | 1487 | CTAAAGATGGCCTGA | 3493 | CUAAAGAUGGCCUGAA |
| intron1 | | | | ATTTATCAATGACAA | | UUUAUCAAUGACAA |
| STMN2_ | − | TTTT | 1488 | CCTAAAGATGGCCTG | 3494 | CCUAAAGAUGGCCUGA |
| intron1 | | | | AATTTATCAATGACA | | AUUUAUCAAUGACA |
| STMN2_ | − | ATT | 1489 | TCCTAAAGATGGCCTG | 3495 | UCCUAAAGAUGGCCUG |
| intron1 | | T | | AATTTATCAATGAC | | AAUUUAUCAAUGAC |
| STMN2_ | − | ATT | 1490 | ATAAATCCGGAATTTT | 3496 | AUAAAUCCGGAAUUUU |
| intron1 | | G | | CCTAAAGATGGCCT | | CCUAAAGAUGGCCU |
| STMN2_ | − | GTT | 1491 | AAGTAAAAAATAATG | 3497 | AAGUAAAAAAUAAUGG |
| intron1 | | G | | GTGATTGATAAATCC | | UGAUUGAUAAAUCC |
| STMN2_ | − | GTT | 1492 | TACAGATTTAACTTTA | 3498 | UACAGAUUUAACUUUA |
| intron1 | | G | | AAATTCTGTTTGAT | | AAAUUCUGUUUGAU |
| STMN2_ | + | GTT | 1493 | CTCACCCTTGGTGGAT | 3499 | CUCACCCUUGGUGGAU |
| intron1 | | C | | TTAGTCTTTTGCAG | | UUAGUCUUUUGCAG |
| STMN2_ | − | TTTC | 1494 | AATCGATGAAGAAGT | 3500 | AAUCGAUGAAGAAGUA |
| intron1 | | | | AAACAATGATTTTCT | | AACAAUGAUUUUCU |
| STMN2_ | + | GTT | 1495 | TGAAGCCTGTGCCAG | 3501 | UGAAGCCUGUGCCAGG |
| intron1 | | C | | GTATTATGAGAACAA | | UAUUAUGAGAACAA |
| STMN2_ | + | GTT | 1496 | CTTAGTTCTGTGAATA | 3502 | CUUAGUUCUGUGAAUA |
| intron1 | | A | | CCTAGCAGTAGCTA | | CCUAGCAGUAGCUA |
| STMN2_ | + | TTT | 1497 | AGATCAAATAGTTACT | 3503 | AGAUCAAAUAGUUACU |
| intron1 | | A | | TAGTTCTGTGAATA | | UAGUUCUGUGAAUA |
| STMN2_ | + | ATT | 1498 | AAGATCAAATAGTTA | 3504 | AAGAUCAAAUAGUUAC |
| intron1 | | T | | CTTAGTTCTGTGAAT | | UUAGUUCUGUGAAU |
| STMN2_ | + | CTT | 1499 | CCTATAATTTAAGATC | 3505 | CCUAUAAUUUAAGAUC |
| intron1 | | C | | AAATAGTTACTTAG | | AAAUAGUUACUUAG |
| STMN2_ | + | TTTC | 1500 | TTCCCTATAATTTAAG | 3506 | UUCCCUAUAAUUUAAG |
| intron1 | | | | ATCAAATAGTTACT | | AUCAAAUAGUUACU |
| STMN2_ | + | TTTT | 1501 | CTTCCCTATAATTTAA | 3507 | CUUCCCUAUAAUUUAA |
| intron1 | | | | GATCAAATAGTTAC | | GAUCAAAUAGUUAC |
| STMN2_ | + | GTT | 1502 | TCTTCCCTATAATTTA | 3508 | UCUUCCCUAUAAUUUA |
| intron1 | | T | | AGATCAAATAGTTA | | AGAUCAAAUAGUUA |
| STMN2_ | + | ATT | 1503 | ATATAATAAAATAGTT | 3509 | AUAUAAUAAAAUAGUU |
| intron1 | | C | | TTCTTCCCTATAAT | | UUCUUCCCUAUAAU |
| STMN2_ | + | TTTC | 1504 | AGAGTGCCATAAGGC | 3510 | AGAGUGCCAUAAGGCU |
| intron1 | | | | TGATTCATATAATAA | | GAUUCAUAUAAUAA |
| STMN2_ | + | CTTT | 1505 | CAGAGTGCCATAAGG | 3511 | CAGAGUGCCAUAAGGC |
| intron1 | | | | CTGATTCATATAATA | | UGAUUCAUAUAAUA |
| STMN2_ | + | ATT | 1506 | AGGAAATGTCCTTTCA | 3512 | AGGAAAUGUCCUUUCA |
| intron1 | | C | | GAGTGCCATAAGGC | | GAGUGCCAUAAGGC |
| STMN2_ | + | TTT | 1507 | CTCAGATTCAGGAAA | 3513 | CUCAGAUUCAGGAAAU |
| intron1 | | A | | TGTCCTTTCAGAGTG | | GUCCUUUCAGAGUG |
| STMN2_ | + | ATT | 1508 | ACTCAGATTCAGGAA | 3514 | ACUCAGAUUCAGGAAA |
| intron1 | | T | | ATGTCCTTTCAGAGT | | UGUCCUUUCAGAGU |
| STMN2_ | + | ATT | 1509 | AAAAATGCTACAAGA | 3515 | AAAAAUGCUACAAGAG |
| intron1 | | A | | GGCTACAATTTACTC | | GCUACAAUUUACUC |
| STMN2_ | + | ATT | 1510 | TCAGTGATTAAAAAA | 3516 | UCAGUGAUUAAAAAAU |
| intron1 | | C | | TGCTACAAGAGGCTA | | GCUACAAGAGGCUA |
| STMN2_ | + | CTT | 1511 | CATCAAATAGCTCATT | 3517 | CAUCAAAUAGCUCAUU |
| intron1 | | C | | CTCAGTGATTAAAA | | CUCAGUGAUUAAAA |
| STMN2_ | + | TTT | 1512 | GCACAATATGACTTCC | 3518 | GCACAAUAUGACUUCC |
| intron1 | | G | | ATCAAATAGCTCAT | | AUCAAAUAGCUCAU |
| STMN2_ | + | ATT | 1513 | GGCACAATATGACTTC | 3519 | GGCACAAUAUGACUUC |
| intron1 | | T | | CATCAAATAGCTCA | | CAUCAAAUAGCUCA |
| STMN2_ | + | TTT | 1514 | ATCATTTGGCACAATA | 3520 | AUCAUUUGGCACAAUA |
| intron1 | | A | | TGACTTCCATCAAA | | UGACUUCCAUCAAA |
| STMN2_ | + | ATT | 1515 | AATCATTTGGCACAAT | 3521 | AAUCAUUUGGCACAAU |
| intron1 | | T | | ATGACTTCCATCAA | | AUGACUUCCAUCAA |
| STMN2_ | + | ATT | 1516 | CTAATGGATAGATGG | 3522 | CUAAUGGAUAGAUGGU |
| intron1 | | A | | TGGAATAAGCATTTA | | GGAAUAAGCAUUUA |
| STMN2_ | + | TTTC | 1517 | AAATTACTAATGGAT | 3523 | AAAUUACUAAUGGAUA |
| intron1 | | | | AGATGGTGGAATAAG | | GAUGGUGGAAUAAG |
| STMN2_ | + | TTTT | 1518 | CAAATTACTAATGGAT | 3524 | CAAAUUACUAAUGGAU |
| intron1 | | | | AGATGGTGGAATAA | | AGAUGGUGGAAUAA |
| STMN2_ | + | TTTT | 1519 | TCAAATTACTAATGGA | 3525 | UCAAAUUACUAAUGGA |
| intron1 | | | | TAGATGGTGGAATA | | UAGAUGGUGGAAUA |
| STMN2_ | + | ATT | 1520 | TTCAAATTACTAATGG | 3526 | UUCAAAUUACUAAUGG |
| intron1 | | T | | ATAGATGGTGGAAT | | AUAGAUGGUGGAAU |
| STMN2_ | + | TTT | 1521 | TTTTTCAAATTACTAA | 3527 | UUUUUCAAAUUACUAA |
| intron1 | | A | | TGGATAGATGGTGG | | UGGAUAGAUGGUGG |
| STMN2_ | + | TTTT | 1522 | ATTTTTCAAATTACTA | 3528 | AUUUUUCAAAUUACUA |
| intron1 | | | | ATGGATAGATGGTG | | AUGGAUAGAUGGUG |
| STMN2_ | + | CTT | 1523 | GTTCTGTGAATACCTA | 3529 | GUUCUGUGAAUACCUA |
| intron1 | | A | | GCAGTAGCTATCAA | | GCAGUAGCUAUCAA |
| STMN2_ | + | TTTT | 1524 | TATTTTTCAAATTACT | 3530 | UAUUUUUCAAAUUACU |
| intron1 | | | | AATGGATAGATGGT | | AAUGGAUAGAUGGU |
| STMN2_ | + | GTT | 1525 | TGTGAATACCTAGCA | 3531 | UGUGAAUACCUAGCAG |
| intron1 | | C | | GTAGCTATCAAACAG | | UAGCUAUCAAACAG |
| STMN2_ | + | TTTT | 1526 | AAAGTTAAATCTGTAC | 3532 | AAAGUUAAAUCUGUAC |
| intron1 | | | | AACTAACAATGAAG | | AACUAACAAUGAAG |
| STMN2_ | + | TTTT | 1527 | GGTCGTGGGAAGAAA | 3533 | GGUCGUGGGAAGAAAA |
| intron1 | | | | AACACATATTATCCT | | ACACAUAUUAUCCU |
| STMN2_ | + | TTTT | 1528 | TGGTCGTGGGAAGAA | 3534 | UGGUCGUGGGAAGAAA |
| intron1 | | | | AAACACATATTATCC | | AACACAUAUUAUCC |
| STMN2_ | + | TTTT | 1529 | TTGGTCGTGGGAAGA | 3535 | UUGGUCGUGGGAAGAA |
| intron1 | | | | AAAACACATATTATC | | AAACACAUAUUAUC |
| STMN2_ | + | CTTT | 1530 | TTTGGTCGTGGGAAG | 3536 | UUUGGUCGUGGGAAGA |
| intron1 | | | | AAAAACACATATTAT | | AAAACACAUAUUAU |
| STMN2_ | + | TTTC | 1531 | TTTTTTGGTCGTGGGA | 3537 | UUUUUUGGUCGUGGGA |
| intron1 | | | | AGAAAAACACATAT | | AGAAAAACACAUAU |
| STMN2_ | + | GTT | 1532 | CTTTTTTGGTCGTGGG | 3538 | CUUUUUUGGUCGUGGG |
| intron1 | | T | | AAGAAAAACACATA | | AAGAAAAACACAUA |
| STMN2_ | + | ATT | 1533 | CTCACAGGAGGCTGA | 3539 | CUCACAGGAGGCUGAA |
| intron1 | | G | | AAAAAGCTGGCCTCC | | AAAAGCUGGCCUCC |
| STMN2_ | + | CTT | 1534 | GTAGCTCATTGCTCAC | 3540 | GUAGCUCAUUGCUCAC |
| intron1 | | G | | AGGAGGCTGAAAAA | | AGGAGGCUGAAAAA |
| STMN2_ | + | CTT | 1535 | AACTGAGTGTGACTG | 3541 | AACUGAGUGUGACUGA |
| intron1 | | C | | ATCACATGCTCAGGC | | UCACAUGCUCAGGC |
| STMN2_ | + | TTT | 1536 | CTTCAACTGAGTGTGA | 3542 | CUUCAACUGAGUGUGA |
| intron1 | | A | | CTGATCACATGCTC | | CUGAUCACAUGCUC |
| STMN2_ | + | TTTT | 1537 | ACTTCAACTGAGTGTG | 3543 | ACUUCAACUGAGUGUG |
| intron1 | | | | ACTGATCACATGCT | | ACUGAUCACAUGCU |
| STMN2_ | + | TTTT | 1538 | TACTTCAACTGAGTGT | 3544 | UACUUCAACUGAGUGU |
| intron1 | | | | GACTGATCACATGC | | GACUGAUCACAUGC |
| STMN2_ | + | TTTT | 1539 | TTACTTCAACTGAGTG | 3545 | UUACUUCAACUGAGUG |
| intron1 | | | | TGACTGATCACATG | | UGACUGAUCACAUG |
| STMN2_ | + | ATT | 1540 | TTTACTTCAACTGAGT | 3546 | UUUACUUCAACUGAGU |
| intron1 | | T | | GTGACTGATCACAT | | GUGACUGAUCACAU |
| STMN2_ | + | ATT | 1541 | TTTTTTACTTCAACTG | 3547 | UUUUUUACUUCAACUG |
| intron1 | | A | | AGTGTGACTGATCA | | AGUGUGACUGAUCA |
| STMN2_ | + | TTT | 1542 | TCAATCACCATTATTT | 3548 | UCAAUCACCAUUAUUU |
| intron1 | | A | | TTTACTTCAACTGA | | UUUACUUCAACUGA |
| STMN2_ | + | ATT | 1543 | ATCAATCACCATTATT | 3549 | AUCAAUCACCAUUAUU |
| intron1 | | T | | TTTTACTTCAACTG | | UUUUACUUCAACUG |
| STMN2_ | + | ATT | 1544 | CGGATTTATCAATCAC | 3550 | CGGAUUUAUCAAUCAC |
| intron1 | | C | | CATTATTTTTTACT | | CAUUAUUUUUUACU |
| STMN2_ | + | TTT | 1545 | GGAAAATTCCGGATTT | 3551 | GGAAAAUUCCGGAUUU |
| intron1 | | A | | ATCAATCACCATTA | | AUCAAUCACCAUUA |
| STMN2_ | + | CTTT | 1546 | AGGAAAATTCCGGAT | 3552 | AGGAAAAUUCCGGAUU |
| intron1 | | | | TTATCAATCACCATT | | UAUCAAUCACCAUU |
| STMN2_ | + | ATT | 1547 | AGGCCATCTTTAGGA | 3553 | AGGCCAUCUUUAGGAA |
| intron1 | | C | | AAATTCCGGATTTAT | | AAUUCCGGAUUUAU |
| STMN2_ | + | ATT | 1548 | ATAAATTCAGGCCATC | 3554 | AUAAAUUCAGGCCAUC |
| intron1 | | G | | TTTAGGAAAATTCC | | UUUAGGAAAAUUCC |
| STMN2_ | + | TTT | 1549 | TCATTGATAAATTCAG | 3555 | UCAUUGAUAAAUUCAG |
| intron1 | | G | | GCCATCTTTAGGAA | | GCCAUCUUUAGGAA |
| STMN2_ | + | CTTT | 1550 | GTCATTGATAAATTCA | 3556 | GUCAUUGAUAAAUUCA |
| intron1 | | | | GGCCATCTTTAGGA | | GGCCAUCUUUAGGA |
| STMN2_ | + | ATT | 1551 | AATGGAAGACTTTGTC | 3557 | AAUGGAAGACUUUGUC |
| intron1 | | G | | ATTGATAAATTCAG | | AUUGAUAAAUUCAG |
| STMN2_ | + | GTT | 1552 | AATCTGTACAACTAAC | 3558 | AAUCUGUACAACUAAC |
| intron1 | | A | | AATGAAGTGGAGGA | | AAUGAAGUGGAGGA |
| STMN2_ | + | TTT | 1553 | AAGTTAAATCTGTACA | 3559 | AAGUUAAAUCUGUACA |
| intron1 | | A | | ACTAACAATGAAGT | | ACUAACAAUGAAGU |
| STMN2_ | + | ATT | 1554 | TAAAGTTAAATCTGTA | 3560 | UAAAGUUAAAUCUGUA |
| intron1 | | T | | CAACTAACAATGAA | | CAACUAACAAUGAA |
| STMN2_ | + | GTT | 1555 | TTATTTTTCAAATTAC | 3561 | UUAUUUUUCAAAUUAC |
| intron1 | | T | | TAATGGATAGATGG | | UAAUGGAUAGAUGG |
| STMN2_ | + | TTT | 1556 | GGTTTTTATTTTTCAA | 3562 | GGUUUUUAUUUUUCAA |
| intron1 | | G | | ATTACTAATGGATA | | AUUACUAAUGGAUA |
| STMN2_ | + | CTTT | 1557 | GGGTTTTTATTTTTCA | 3563 | GGGUUUUUAUUUUUCA |
| intron1 | | | | AATTACTAATGGAT | | AAUUACUAAUGGAU |
| STMN2_ | + | TTTT | 1558 | TTACAATAATGTGACT | 3564 | UUACAAUAAUGUGACU |
| intron1 | | | | TACAGATTTGTAGT | | UACAGAUUUGUAGU |
| STMN2_ | + | TTTT | 1559 | TTTACAATAATGTGAC | 3565 | UUUACAAUAAUGUGAC |
| intron1 | | | | TTACAGATTTGTAG | | UUACAGAUUUGUAG |
| STMN2_ | + | TTTT | 1560 | TTTTACAATAATGTGA | 3566 | UUUUACAAUAAUGUGA |
| intron1 | | | | CTTACAGATTTGTA | | CUUACAGAUUUGUA |
| STMN2_ | + | TTTT | 1561 | TTTTTACAATAATGTG | 3567 | UUUUUACAAUAAUGUG |
| intron1 | | | | ACTTACAGATTTGT | | ACUUACAGAUUUGU |
| STMN2_ | + | GTT | 1562 | TTTTTTACAATAATGT | 3568 | UUUUUUACAAUAAUGU |
| intron1 | | T | | GACTTACAGATTTG | | GACUUACAGAUUUG |
| STMN2_ | + | ATT | 1563 | ACAATGGTTTTTTTTT | 3569 | ACAAUGGUUUUUUUUU |
| intron1 | | C | | ACAATAATGTGACT | | ACAAUAAUGUGACU |
| STMN2_ | + | TTT | 1564 | GTCAAAATTCACAAT | 3570 | GUCAAAAUUCACAAUG |
| intron1 | | A | | GGTTTTTTTTTACAA | | GUUUUUUUUUACAA |
| STMN2_ | + | CTTT | 1565 | AGTCAAAATTCACAA | 3571 | AGUCAAAAUUCACAAU |
| intron1 | | | | TGGTTTTTTTTTACA | | GGUUUUUUUUUACA |
| STMN2_ | + | ATT | 1566 | AAATCTACAACTTTAG | 3572 | AAAUCUACAACUUUAG |
| intron1 | | A | | TCAAAATTCACAAT | | UCAAAAUUCACAAU |
| STMN2_ | + | TTT | 1567 | TGCTATTAAAATCTAC | 3573 | UGCUAUUAAAAUCUAC |
| intron1 | | G | | AACTTTAGTCAAAA | | AACUUUAGUCAAAA |
| STMN2_ | + | ATT | 1568 | GTGCTATTAAAATCTA | 3574 | GUGCUAUUAAAAUCUA |
| intron1 | | T | | CAACTTTAGTCAAA | | CAACUUUAGUCAAA |
| STMN2_ | + | ATT | 1569 | GACATTTGTGCTATTA | 3575 | GACAUUUGUGCUAUUA |
| intron1 | | G | | AAATCTACAACTTT | | AAAUCUACAACUUU |
| STMN2_ | + | ATT | 1570 | AGATTGGACATTTGTG | 3576 | AGAUUGGACAUUUGUG |
| intron1 | | A | | CTATTAAAATCTAC | | CUAUUAAAAUCUAC |
| STMN2_ | + | TTT | 1571 | AAATGATAATTAAGA | 3577 | AAAUGAUAAUUAAGAU |
| intron1 | | A | | TTGGACATTTGTGCT | | UGGACAUUUGUGCU |
| STMN2_ | + | TTTT | 1572 | AAAATGATAATTAAG | 3578 | AAAAUGAUAAUUAAGA |
| intron1 | | | | ATTGGACATTTGTGC | | UUGGACAUUUGUGC |
| STMN2_ | + | ATT | 1573 | TAAAATGATAATTAA | 3579 | UAAAAUGAUAAUUAAG |
| intron1 | | T | | GATTGGACATTTGTG | | AUUGGACAUUUGUG |
| STMN2_ | + | ATT | 1574 | TCTGAGAGAAAGTAT | 3580 | UCUGAGAGAAAGUAUA |
| intron1 | | C | | ATTTTAAAATGATAA | | UUUUAAAAUGAUAA |
| STMN2_ | + | GTT | 1575 | AAATTCTCTGAGAGA | 3581 | AAAUUCUCUGAGAGAA |
| intron1 | | A | | AAGTATATTTTAAAA | | AGUAUAUUUUAAAA |
| STMN2_ | + | TTT | 1576 | TCTATGCACGTTAAAA | 3582 | UCUAUGCACGUUAAAA |
| intron1 | | G | | TTCTCTGAGAGAAA | | UUCUCUGAGAGAAA |
| STMN2_ | + | GTT | 1577 | GTCTATGCACGTTAAA | 3583 | GUCUAUGCACGUUAAA |
| intron1 | | T | | ATTCTCTGAGAGAA | | AUUCUCUGAGAGAA |
| STMN2_ | + | CTT | 1578 | TGGTGTTTGTCTATGC | 3584 | UGGUGUUUGUCUAUGC |
| intron1 | | G | | ACGTTAAAATTCTC | | ACGUUAAAAUUCUC |
| STMN2_ | + | ATT | 1579 | ATAGACCTTGTGGTGT | 3585 | AUAGACCUUGUGGUGU |
| intron1 | | A | | TTGTCTATGCACGT | | UUGUCUAUGCACGU |
| STMN2_ | + | TTT | 1580 | TACCAGGTGAGTAAG | 3586 | UACCAGGUGAGUAAGC |
| intron1 | | A | | CTGAGCCTGCAATAA | | UGAGCCUGCAAUAA |
| STMN2_ | + | GTT | 1581 | ATACCAGGTGAGTAA | 3587 | AUACCAGGUGAGUAAG |
| intron1 | | T | | GCTGAGCCTGCAATA | | CUGAGCCUGCAAUA |
| STMN2_ | + | TTT | 1582 | GTTTATACCAGGTGAG | 3588 | GUUUAUACCAGGUGAG |
| intron1 | | A | | TAAGCTGAGCCTGC | | UAAGCUGAGCCUGC |
| STMN2_ | + | ATT | 1583 | AGTTTATACCAGGTGA | 3589 | AGUUUAUACCAGGUGA |
| intron1 | | T | | GTAAGCTGAGCCTG | | GUAAGCUGAGCCUG |
| STMN2_ | + | ATT | 1584 | ATCTCATGTATTTAGT | 3590 | AUCUCAUGUAUUUAGU |
| intron1 | | A | | TTATACCAGGTGAG | | UUAUACCAGGUGAG |
| STMN2_ | + | TTTT | 1585 | TACAATAATGTGACTT | 3591 | UACAAUAAUGUGACUU |
| intron1 | | | | ACAGATTTGTAGTA | | ACAGAUUUGUAGUA |
| STMN2_ | + | TTTT | 1586 | ACAATAATGTGACTTA | 3592 | ACAAUAAUGUGACUUA |
| intron1 | | | | CAGATTTGTAGTAA | | CAGAUUUGUAGUAA |
| STMN2_ | + | TTT | 1587 | CAATAATGTGACTTAC | 3593 | CAAUAAUGUGACUUAC |
| intron1 | | A | | AGATTTGTAGTAAA | | AGAUUUGUAGUAAA |
| STMN2_ | + | CTT | 1588 | CAGATTTGTAGTAAAT | 3594 | CAGAUUUGUAGUAAAU |
| intron1 | | A | | TATTCTATTCTAAA | | UAUUCUAUUCUAAA |
| STMN2_ | + | ATT | 1589 | CTTTGGGTTTTTATTTT | 3595 | CUUUGGGUUUUUAUUU |
| intron1 | | A | | TCAAATTACTAAT | | UUCAAAUUACUAAU |
| STMN2_ | + | TTT | 1590 | ATTACTTTGGGTTTTT | 3596 | AUUACUUUGGGUUUUU |
| intron1 | | A | | ATTTTTGAAATTAG | | AUUUUUCAAAUUAC |
| STMN2_ | + | TTTT | 1591 | AATTACTTTGGGTTTT | 3597 | AAUUACUUUGGGUUUU |
| intron1 | | | | TATTTTTCAAATTA | | UAUUUUUCAAAUUA |
| STMN2_ | + | GTT | 1592 | TAATTACTTTGGGTTT | 3598 | UAAUUACUUUGGGUUU |
| intron1 | | T | | TTATTTTTCAAATT | | UUAUUUUUCAAAUU |
| STMN2_ | + | ATT | 1593 | AAAGCAGTTTTAATTA | 3599 | AAAGCAGUUUUAAUUA |
| intron1 | | G | | CTTTGGGTTTTTAT | | CUUUGGGUUUUUAU |
| STMN2_ | + | GTT | 1594 | CATTGAAAGCAGTTTT | 3600 | CAUUGAAAGCAGUUUU |
| intron1 | | G | | AATTACTTTGGGTT | | AAUUACUUUGGGUU |
| STMN2_ | + | TTT | 1595 | TTGCATTGAAAGCAGT | 3601 | UUGCAUUGAAAGCAGU |
| intron1 | | G | | TTTAATTACTTTGG | | UUUAAUUACUUUGG |
| STMN2_ | + | ATT | 1596 | GTTGCATTGAAAGCA | 3602 | GUUGCAUUGAAAGCAG |
| intron1 | | T | | GTTTTAATTACTTTG | | UUUUAAUUACUUUG |
| STMN2_ | + | TTT | 1597 | TTTGTTGCATTGAAAG | 3603 | UUUGUUGCAUUGAAAG |
| intron1 | | A | | CAGTTTTAATTACT | | CAGUUUUAAUUACU |
| STMN2_ | + | TTTT | 1598 | ATTTGTTGCATTGAAA | 3604 | AUUUGUUGCAUUGAAA |
| intron1 | | | | GCAGTTTTAATTAC | | GCAGUUUUAAUUAC |
| STMN2_ | + | CTTT | 1599 | TATTTGTTGCATTGAA | 3605 | UAUUUGUUGCAUUGAA |
| intron1 | | | | AGCAGTTTTAATTA | | AGCAGUUUUAAUUA |
| STMN2_ | + | TTT | 1600 | GCAAACTTTTATTTGT | 3606 | GCAAACUUUUAUUUGU |
| intron1 | | A | | TGCATTGAAAGCAG | | UGCAUUGAAAGCAG |
| STMN2_ | + | TTTT | 1601 | AGCAAACTTTTATTTG | 3607 | AGCAAACUUUUAUUUG |
| intron1 | | | | TTGCATTGAAAGCA | | UUGCAUUGAAAGCA |
| STMN2_ | + | TTT | 1602 | GTCGTGGGAAGAAAA | 3608 | GUCGUGGGAAGAAAAA |
| intron1 | | G | | ACACATATTATCCTG | | CACAUAUUAUCCUG |
| STMN2_ | + | TTTT | 1603 | TAGCAAACTTTTATTT | 3609 | UAGCAAACUUUUAUUU |
| intron1 | | | | GTTGCATTGAAAGC | | GUUGCAUUGAAAGC |
| STMN2_ | + | ATT | 1604 | ATATTTTTAGCAAACT | 3610 | AUAUUUUUAGCAAACU |
| intron1 | | A | | TTTATTTGTTGCAT | | UUUAUUUGUUGCAU |
| STMN2_ | + | ATT | 1605 | CCTCATTAATATTTTT | 3611 | CCUCAUUAAUAUUUUU |
| intron1 | | A | | AGCAAACTTTTATT | | AGCAAACUUUUAUU |
| STMN2_ | + | GTT | 1606 | CAGCTATTACCTCATT | 3612 | CAGCUAUUACCUCAUU |
| intron1 | | A | | AATATTTTTAGCAA | | AAUAUUUUUAGCAA |
| STMN2_ | + | ATT | 1607 | TTACAGCTATTACCTC | 3613 | UUACAGCUAUUACCUC |
| intron1 | | G | | ATTAATATTTTTAG | | AUUAAUAUUUUUAG |
| STMN2_ | + | TTT | 1608 | TTGTTACAGCTATTAC | 3614 | UUGUUACAGCUAUUAC |
| intron1 | | A | | CTCATTAATATTTT | | CUCAUUAAUAUUUU |
| STMN2_ | + | TTTT | 1609 | ATTGTTACAGCTATTA | 3615 | AUUGUUACAGCUAUUA |
| intron1 | | | | CCTCATTAATATTT | | CCUCAUUAAUAUUU |
| STMN2_ | + | TTTT | 1610 | TATTGTTACAGCTATT | 3616 | UAUUGUUACAGCUAUU |
| intron1 | | | | ACCTCATTAATATT | | ACCUCAUUAAUAUU |
| STMN2_ | + | GTT | 1611 | TTATTGTTACAGCTAT | 3617 | UUAUUGUUACAGCUAU |
| intron1 | | T | | TACCTCATTAATAT | | UACCUCAUUAAUAU |
| STMN2_ | + | ATT | 1612 | TAAAAGAGAAATGAG | 3618 | UAAAAGAGAAAUGAGU |
| intron1 | | C | | TGTTTTTATTGTTAC | | GUUUUUAUUGUUAC |
| STMN2_ | + | ATT | 1613 | TATTCTAAAAGAGAA | 3619 | UAUUCUAAAAGAGAAA |
| intron1 | | C | | ATGAGTGTTTTTATT | | UGAGUGUUUUUAUU |
| STMN2_ | + | ATT | 1614 | TTCTATTCTAAAAGAG | 3620 | UUCUAUUCUAAAAGAG |
| intron1 | | A | | AAATGAGTGTTTTT | | AAAUGAGUGUUUUU |
| STMN2_ | + | TTT | 1615 | TAGTAAATTATTCTAT | 3621 | UAGUAAAUUAUUCUAU |
| intron1 | | G | | TCTAAAAGAGAAAT | | UCUAAAAGAGAAAU |
| STMN2_ | + | ATT | 1616 | GTAGTAAATTATTCTA | 3622 | GUAGUAAAUUAUUCUA |
| intron1 | | T | | TTCTAAAAGAGAAA | | UUCUAAAAGAGAAA |
| STMN2_ | + | ATT | 1617 | TTAGCAAACTTTTATT | 3623 | UUAGCAAACUUUUAUU |
| intron1 | | T | | TGTTGCATTGAAAG | | UGUUGCAUUGAAAG |
| STMN2_ | + | ATT | 1618 | TCCTGTTGTCACAAGA | 3624 | UCCUGUUGUCACAAGA |
| intron1 | | A | | TCTGTGACCTTATA | | UCUGUGACCUUAUA |
| STMN2_ | + | GTT | 1619 | TCACAAGATCTGTGAC | 3625 | UCACAAGAUCUGUGAC |
| intron1 | | G | | CTTATATGAAAAAA | | CUUAUAUGAAAAAA |
| STMN2_ | + | CTT | 1620 | TATGAAAAAATGCTA | 3626 | UAUGAAAAAAUGCUAG |
| intron1 | | A | | GAATTTTTTCATTAA | | AAUUUUUUCAUUAA |
| STMN2_ | + | TTTT | 1621 | AAATCTAATCCAATGT | 3627 | AAAUCUAAUCCAAUGU |
| intron1 | | | | GATTTCAATCTAGT | | GAUUUCAAUCUAGU |
| STMN2_ | + | TTTT | 1622 | TAAATCTAATCCAATG | 3628 | UAAAUCUAAUCCAAUG |
| intron1 | | | | TGATTTCAATCTAG | | UGAUUUCAAUCUAG |
| STMN2_ | + | CTTT | 1623 | TTAAATCTAATCCAAT | 3629 | UUAAAUCUAAUCCAAU |
| intron1 | | | | GTGATTTCAATCTA | | GUGAUUUCAAUCUA |
| STMN2_ | + | TTT | 1624 | AAGATACCTTTTTAAA | 3630 | AAGAUACCUUUUUAAA |
| intron1 | | A | | TCTAATCCAATGTG | | UCUAAUCCAAUGUG |
| STMN2_ | + | ATT | 1625 | AAAGATACCTTTTTAA | 3631 | AAAGAUACCUUUUUAA |
| intron1 | | T | | ATCTAATCCAATGT | | AUCUAAUCCAAUGU |
| STMN2_ | + | TTTC | 1626 | CATTTAAAGATACCTT | 3632 | CAUUUAAAGAUACCUU |
| intron1 | | | | TTTAAATCTAATCC | | UUUAAAUCUAAUCC |
| STMN2_ | + | TTTT | 1627 | CCATTTAAAGATACCT | 3633 | CCAUUUAAAGAUACCU |
| intron1 | | | | TTTTAAATCTAATC | | UUUUAAAUCUAAUC |
| STMN2_ | + | CTTT | 1628 | TCCATTTAAAGATACC | 3634 | UCCAUUUAAAGAUACC |
| intron1 | | | | TTTTTAAATCTAAT | | UUUUUAAAUCUAAU |
| STMN2_ | + | TTTC | 1629 | TTTTCCATTTAAAGAT | 3635 | UUUUCCAUUUAAAGAU |
| intron1 | | | | ACCTTTTTAAATCT | | ACCUUUUUAAAUCU |
| STMN2_ | + | CTTT | 1630 | CTTTTCCATTTAAAGA | 3636 | CUUUUCCAUUUAAAGA |
| intron1 | | | | TACCTTTTTAAATC | | UACCUUUUUAAAUC |
| STMN2_ | + | CTT | 1631 | TAAGTCTGTCTTTCTT | 3637 | UAAGUCUGUCUUUCUU |
| intron1 | | c | | TTCCATTTAAAGAT | | UUCCAUUUAAAGAU |
| STMN2_ | + | TTTC | 1632 | CCATCTTCTAAGTCTG | 3638 | CCAUCUUCUAAGUCUG |
| intron1 | | | | TCTTTCTTTTCCAT | | UCUUUCUUUUCCAU |
| STMN2_ | + | TTTT | 1633 | CCCATCTTCTAAGTCT | 3639 | CCCAUCUUCUAAGUCU |
| intron1 | | | | GTCTTTCTTTTCCA | | GUCUUUCUUUUCCA |
| STMN2_ | + | TTTT | 1634 | TCCCATCTTCTAAGTC | 3640 | UCCCAUCUUCUAAGUC |
| intron1 | | | | TGTCTTTCTTTTCC | | UGUCUUUCUUUUCC |
| STMN2_ | + | ATT | 1635 | TTCCCATCTTCTAAGT | 3641 | UUCCCAUCUUCUAAGU |
| intron1 | | T | | CTGTCTTTCTTTTC | | CUGUCUUUCUUUUC |
| STMN2_ | + | GTT | 1636 | TTTTTCCCATCTTCTA | 3642 | UUUUUCCCAUCUUCUA |
| intron1 | | A | | AGTCTGTCTTTCTT | | AGUCUGUCUUUCUU |
| STMN2_ | + | CTT | 1637 | GCGAGTAAAACAGGC | 3643 | GCGAGUAAAACAGGCA |
| intron1 | | A | | AGGTATGTGATACTG | | GGUAUGUGAUACUG |
| STMN2_ | + | GTT | 1638 | AGAGCACATCTGAAT | 3644 | AGAGCACAUCUGAAUA |
| intron1 | | C | | ATCAGAGTCTCCACC | | UCAGAGUCUCCACC |
| STMN2_ | + | ATT | 1639 | AAATGTGCCCCCTGTT | 3645 | AAAUGUGCCCCCUGUU |
| intron1 | | G | | CAGAGCACATCTGA | | CAGAGCACAUCUGA |
| STMN2_ | + | CTT | 1640 | ATCGATTGAAATGTGC | 3646 | AUCGAUUGAAAUGUGC |
| intron1 | | C | | CCCCTGTTCAGAGC | | CCCCUGUUCAGAGC |
| STMN2_ | + | CTT | 1641 | TTCATCGATTGAAATG | 3647 | UUCAUCGAUUGAAAUG |
| intron1 | | C | | TGCCCCCTGTTCAG | | UGCCCCCUGUUCAG |
| STMN2_ | + | TTT | 1642 | CTTCTTCATCGATTGA | 3648 | CUUCUUCAUCGAUUGA |
| intron1 | | A | | AATGTGCCCCCTGT | | AAUGUGCCCCCUGU |
| STMN2_ | + | GTT | 1643 | ACTTCTTCATCGATTG | 3649 | ACUUCUUCAUCGAUUG |
| intron1 | | T | | AAATGTGCCCCCTG | | AAAUGUGCCCCCUG |
| STMN2_ | + | ATT | 1644 | TTTACTTCTTCATCGA | 3650 | UUUACUUCUUCAUCGA |
| intron1 | | G | | TTGAAATGTGCCCC | | UUGAAAUGUGCCCC |
| STMN2_ | + | ATT | 1645 | AAGAAAATCATTGTTT | 3651 | AAGAAAAUCAUUGUUU |
| intron1 | | A | | ACTTCTTCATCGAT | | ACUUCUUCAUCGAU |
| STMN2_ | + | CTT | 1646 | AAAATAAAGGAATAA | 3652 | AAAAUAAAGGAAUAAA |
| intron1 | | A | | ATTAAAGAAAATCAT | | UUAAAGAAAAUCAU |
| STMN2_ | + | TTT | 1647 | ATGCTTAAAAATAAA | 3653 | AUGCUUAAAAAUAAAG |
| intron1 | | A | | GGAATAAATTAAAGA | | GAAUAAAUUAAAGA |
| STMN2_ | + | TTT | 1648 | AATCTAATCCAATGTG | 3654 | AAUCUAAUCCAAUGUG |
| intron1 | | A | | ATTTCAATCTAGTT | | AUUUCAAUCUAGUU |
| STMN2_ | + | ATT | 1649 | CAATCTAGTTTTATCA | 3655 | CAAUCUAGUUUUAUCA |
| intron1 | | T | | GATTTCAACAATTA | | GAUUUCAACAAUUA |
| STMN2_ | + | TTTC | 1650 | AATCTAGTTTTATCAG | 3656 | AAUCUAGUUUUAUCAG |
| intron1 | | | | ATTTCAACAATTAT | | AUUUCAACAAUUAU |
| STMN2_ | + | GTT | 1651 | TATCAGATTTCAACAA | 3657 | UAUCAGAUUUCAACAA |
| intron1 | | T | | TTATTGAGCATCTC | | UUAUUGAGCAUCUC |
| STMN2_ | + | ATT | 1652 | TTTGATTACATTTTAT | 3658 | UUUGAUUACAUUUUAU |
| intron1 | | T | | GTAATTCTAATCCA | | GUAAUUCUAAUCCA |
| STMN2_ | + | ATT | 1653 | TTTTTTGATTACATTTT | 3659 | UUUUUUGAUUACAUUU |
| intron1 | | A | | ATGTAATTCTAAT | | UAUGUAAUUCUAAU |
| STMN2_ | + | ATT | 1654 | ATAGAATTATTTTTTG | 3660 | AUAGAAUUAUUUUUUG |
| intron1 | | G | | ATTACATTTTATGT | | AUUACAUUUUAUGU |
| STMN2_ | + | TTT | 1655 | AATATGCATTGATAG | 3661 | AAUAUGCAUUGAUAGA |
| intron1 | | A | | AATTATTTTTTGATT | | AUUAUUUUUUGAUU |
| STMN2_ | + | TTTT | 1656 | AAATATGCATTGATA | 3662 | AAAUAUGCAUUGAUAG |
| intron1 | | | | GAATTATTTTTTGAT | | AAUUAUUUUUUGAU |
| STMN2_ | + | TTTT | 1657 | TAAATATGCATTGATA | 3663 | UAAAUAUGCAUUGAUA |
| intron1 | | | | GAATTATTTTTTGA | | GAAUUAUUUUUUGA |
| STMN2_ | + | TTTT | 1658 | TTAAATATGCATTGAT | 3664 | UUAAAUAUGCAUUGAU |
| intron1 | | | | AGAATTATTTTTTG | | AGAAUUAUUUUUUG |
| STMN2_ | + | ATT | 1659 | TTTAAATATGCATTGA | 3665 | UUUAAAUAUGCAUUGA |
| intron1 | | T | | TAGAATTATTTTTT | | UAGAAUUAUUUUUU |
| STMN2_ | + | TTT | 1660 | GGTATCATCAAAAGT | 3666 | GGUAUCAUCAAAAGUG |
| intron1 | | G | | GGATTTTTTAAATAT | | GAUUUUUUAAAUAU |
| STMN2_ | + | TTTT | 1661 | GGGTATCATCAAAAG | 3667 | GGGUAUCAUCAAAAGU |
| intron1 | | | | TGGATTTTTTAAATA | | GGAUUUUUUAAAUA |
| STMN2_ | + | ATT | 1662 | TGGGTATCATCAAAA | 3668 | UGGGUAUCAUCAAAAG |
| intron1 | | T | | GTGGATTTTTTAAAT | | UGGAUUUUUUAAAU |
| STMN2_ | + | TTT | 1663 | ACGAAGTAAGAAGAA | 3669 | ACGAAGUAAGAAGAAA |
| intron1 | | A | | ATATATAAGTATAAA | | UAUAUAAGUAUAAA |
| STMN2_ | + | TTTT | 1664 | AACGAAGTAAGAAGA | 3670 | AACGAAGUAAGAAGAA |
| intron1 | | | | AATATATAAGTATAA | | AUAUAUAAGUAUAA |
| STMN2_ | + | TTTT | 1665 | AATGCTTAAAAATAA | 3671 | AAUGCUUAAAAAUAAA |
| intron1 | | | | AGGAATAAATTAAAG | | GGAAUAAAUUAAAG |
| STMN2_ | + | ATT | 1666 | TAACGAAGTAAGAAG | 3672 | UAACGAAGUAAGAAGA |
| intron1 | | T | | AAATATATAAGTATA | | AAUAUAUAAGUAUA |
| STMN2_ | + | ATT | 1667 | GAAAATCGATGTTAA | 3673 | GAAAAUCGAUGUUAAU |
| intron1 | | A | | TTTTAACGAAGTAAG | | UUUAACGAAGUAAG |
| STMN2_ | + | TTT | 1668 | TTAGAAAATCGATGTT | 3674 | UUAGAAAAUCGAUGUU |
| intron1 | | A | | AATTTTAACGAAGT | | AAUUUUAACGAAGU |
| STMN2_ | + | GTT | 1669 | ATTAGAAAATCGATG | 3675 | AUUAGAAAAUCGAUGU |
| intron1 | | T | | TTAATTTTAACGAAG | | UAAUUUUAACGAAG |
| STMN2_ | + | TTTC | 1670 | TGTTTATTAGAAAATC | 3676 | UGUUUAUUAGAAAAUC |
| intron1 | | | | GATGTTAATTTTAA | | GAUGUUAAUUUUAA |
| STMN2_ | + | TTTT | 1671 | CTGTTTATTAGAAAAT | 3677 | CUGUUUAUUAGAAAAU |
| intron1 | | | | CGATGTTAATTTTA | | CGAUGUUAAUUUUA |
| STMN2_ | + | GTT | 1672 | TCTGTTTATTAGAAAA | 3678 | UCUGUUUAUUAGAAAA |
| intron1 | | T | | TCGATGTTAATTTT | | UCGAUGUUAAUUUU |
| STMN2_ | + | CTT | 1673 | TAGTGGTTTTCTGTTT | 3679 | UAGUGGUUUUCUGUUU |
| intron1 | | G | | ATTAGAAAATCGAT | | AUUAGAAAAUCGAU |
| STMN2_ | + | ATT | 1674 | AGCATCTCCTTGTAGT | 3680 | AGCAUCUCCUUGUAGU |
| intron1 | | G | | GGTTTTCTGTTTAT | | GGUUUUCUGUUUAU |
| STMN2_ | + | ATT | 1675 | TTGAGCATCTCCTTGT | 3681 | UUGAGCAUCUCCUUGU |
| intron1 | | A | | AGTGGTTTTCTGTT | | AGUGGUUUUCUGUU |
| STMN2_ | + | TTTC | 1676 | AACAATTATTGAGCAT | 3682 | AACAAUUAUUGAGCAU |
| intron1 | | | | CTCCTTGTAGTGGT | | CUCCUUGUAGUGGU |
| STMN2_ | + | ATT | 1677 | CAACAATTATTGAGC | 3683 | CAACAAUUAUUGAGCA |
| intron1 | | T | | ATCTCCTTGTAGTGG | | UCUCCUUGUAGUGG |
| STMN2_ | + | TTT | 1678 | TCAGATTTCAACAATT | 3684 | UCAGAUUUCAACAAUU |
| intron1 | | A | | ATTGAGCATCTCCT | | AUUGAGCAUCUCCU |
| STMN2_ | + | TTTT | 1679 | ATCAGATTTCAACAAT | 3685 | AUCAGAUUUCAACAAU |
| intron1 | | | | TATTGAGCATCTCC | | UAUUGAGCAUCUCC |
| STMN2_ | + | GTT | 1680 | ATTTTAACGAAGTAA | 3686 | AUUUUAACGAAGUAAG |
| intron1 | | A | | GAAGAAATATATAAG | | AAGAAAUAUAUAAG |
| STMN2_ | + | TTT | 1681 | TCAATTAATCTCATGT | 3687 | UCAAUUAAUCUCAUGU |
| intron1 | | A | | ATTTAGTTTATACC | | AUUUAGUUUAUACC |
| STMN2_ | + | ATT | 1682 | TAATGCTTAAAAATA | 3688 | UAAUGCUUAAAAAUAA |
| intron1 | | T | | AAGGAATAAATTAAA | | AGGAAUAAAUUAAA |
| STMN2_ | + | ATT | 1683 | AGCAGCCGAATATTTT | 3689 | AGCAGCCGAAUAUUUU |
| intron1 | | T | | AATGCTTAAAAATA | | AAUGCUUAAAAAUA |
| STMN2_ | + | TTT | 1684 | CCAGGAACATTCAAG | 3690 | CCAGGAACAUUCAAGU |
| intron1 | | A | | TGTTTATTCAATAAG | | GUUUAUUCAAUAAG |
| STMN2_ | + | TTTT | 1685 | ACCAGGAACATTCAA | 3691 | ACCAGGAACAUUCAAG |
| intron1 | | | | GTGTTTATTCAATAA | | UGUUUAUUCAAUAA |
| STMN2_ | + | CTTT | 1686 | TACCAGGAACATTCA | 3692 | UACCAGGAACAUUCAA |
| intron1 | | | | AGTGTTTATTCAATA | | GUGUUUAUUCAAUA |
| STMN2_ | + | TTTC | 1687 | TTTTACCAGGAACATT | 3693 | UUUUACCAGGAACAUU |
| intron1 | | | | CAAGTGTTTATTCA | | CAAGUGUUUAUUCA |
| STMN2_ | + | TTTT | 1688 | CTTTTACCAGGAACAT | 3694 | CUUUUACCAGGAACAU |
| intron1 | | | | TCAAGTGTTTATTC | | UCAAGUGUUUAUUC |
| STMN2_ | + | CTTT | 1689 | TCTTTTACCAGGAACA | 3695 | UCUUUUACCAGGAACA |
| intron1 | | | | TTCAAGTGTTTATT | | UUCAAGUGUUUAUU |
| STMN2_ | + | TTT | 1690 | ATAAAATCTTTTCTTT | 3696 | AUAAAAUCUUUUCUUU |
| intron1 | | A | | TACCAGGAACATTC | | UACCAGGAACAUUC |
| STMN2_ | + | GTT | 1691 | AATAAAATCTTTTCTT | 3697 | AAUAAAAUCUUUUCUU |
| intron1 | | T | | TTACCAGGAACATT | | UUACCAGGAACAUU |
| STMN2_ | + | ATT | 1692 | ACTGTTTAATAAAATC | 3698 | ACUGUUUAAUAAAAUC |
| intron1 | | A | | TTTTCTTTTACCAG | | UUUUCUUUUACCAG |
| STMN2_ | + | GTT | 1693 | CAAATATTAACTGTTT | 3699 | CAAAUAUUAACUGUUU |
| intron1 | | C | | AATAAAATCTTTTC | | AAUAAAAUCUUUUC |
| STMN2_ | + | ATT | 1694 | ATGTAAACCTAGTTCC | 3700 | AUGUAAACCUAGUUCC |
| intron1 | | G | | AAATATTAACTGTT | | AAAUAUUAACUGUU |
| STMN2_ | + | GTT | 1695 | TCTAAAAAAGCAGAT | 3701 | UCUAAAAAAGCAGAUG |
| intron1 | | C | | GATTGATGTAAACCT | | AUUGAUGUAAACCU |
| STMN2_ | + | TTTC | 1696 | ACCACACTAGAGGGC | 3702 | ACCACACUAGAGGGCA |
| intron1 | | | | AATCATGTTCTCTAA | | AUCAUGUUCUCUAA |
| STMN2_ | + | TTTT | 1697 | CACCACACTAGAGGG | 3703 | CACCACACUAGAGGGC |
| intron1 | | | | CAATCATGTTCTCTA | | AAUCAUGUUCUCUA |
| STMN2_ | + | CTTT | 1698 | TCACCACACTAGAGG | 3704 | UCACCACACUAGAGGG |
| intron1 | | | | GCAATCATGTTCTCT | | CAAUCAUGUUCUCU |
| STMN2_ | + | ATT | 1699 | ACTTTTCACCACACTA | 3705 | ACUUUUCACCACACUA |
| intron1 | | A | | GAGGGCAATCATGT | | GAGGGCAAUCAUGU |
| STMN2_ | + | ATT | 1700 | GAAAACCTCGGTGTCT | 3706 | GAAAACCUCGGUGUCU |
| intron1 | | G | | GCATTAACTTTTCA | | GCAUUAACUUUUCA |
| STMN2_ | + | GTT | 1701 | TGTCCATTGGAAAACC | 3707 | UGUCCAUUGGAAAACC |
| intron1 | | C | | TCGGTGTCTGCATT | | UCGGUGUCUGCAUU |
| STMN2_ | + | TTTC | 1702 | AGAACCTAGACTGGT | 3708 | AGAACCUAGACUGGUU |
| intron1 | | | | TCTGTCCATTGGAAA | | CUGUCCAUUGGAAA |
| STMN2_ | + | TTTT | 1703 | CAGAACCTAGACTGG | 3709 | CAGAACCUAGACUGGU |
| intron1 | | | | TTCTGTCCATTGGAA | | UCUGUCCAUUGGAA |
| STMN2_ | + | GTT | 1704 | TCAGAACCTAGACTG | 3710 | UCAGAACCUAGACUGG |
| intron1 | | T | | GTTCTGTCCATTGGA | | UUCUGUCCAUUGGA |
| STMN2_ | + | ATT | 1705 | AAAAAGAAAATACTG | 3711 | AAAAAGAAAAUACUGA |
| intron1 | | A | | AACTAGCCAGTGACC | | ACUAGCCAGUGACC |
| STMN2_ | + | TTTC | 1706 | ATTAAAAAAGAAAAT | 3712 | AUUAAAAAAGAAAAUA |
| intron1 | | | | ACTGAACTAGCCAGT | | CUGAACUAGCCAGU |
| STMN2_ | + | TTTT | 1707 | CATTAAAAAAGAAAA | 3713 | CAUUAAAAAAGAAAAU |
| intron1 | | | | TACTGAACTAGCCAG | | ACUGAACUAGCCAG |
| STMN2_ | + | TTTT | 1708 | TCATTAAAAAAGAAA | 3714 | UCAUUAAAAAAGAAAA |
| intron1 | | | | ATACTGAACTAGCCA | | UACUGAACUAGCCA |
| STMN2_ | + | TTTT | 1709 | TTCATTAAAAAAGAA | 3715 | UUCAUUAAAAAAGAAA |
| intron1 | | | | AATACTGAACTAGCC | | AUACUGAACUAGCC |
| STMN2_ | + | ATT | 1710 | TTTCATTAAAAAAGA | 3716 | UUUCAUUAAAAAAGAA |
| intron1 | | T | | AAATACTGAACTAGC | | AAUACUGAACUAGC |
| STMN2_ | + | ATT | 1711 | AAGTGTTTATTCAATA | 3717 | AAGUGUUUAUUCAAUA |
| intron1 | | C | | AGCTGATGCCATGC | | AGCUGAUGCCAUGC |
| STMN2_ | + | GTT | 1712 | ATTCAATAAGCTGATG | 3718 | AUUCAAUAAGCUGAUG |
| intron1 | | T | | CCATGCTTTACCCT | | CCAUGCUUUACCCU |
| STMN2_ | + | TTT | 1713 | TTCAATAAGCTGATGC | 3719 | UUCAAUAAGCUGAUGC |
| intron1 | | A | | CATGCTTTACCCTA | | CAUGCUUUACCCUA |
| STMN2_ | + | ATT | 1714 | AATAAGCTGATGCCA | 3720 | AAUAAGCUGAUGCCAU |
| intron1 | | C | | TGCTTTACCCTAGTG | | GCUUUACCCUAGUG |
| STMN2_ | + | GTT | 1715 | TTTAGCAGCCGAATAT | 3721 | UUUAGCAGCCGAAUAU |
| intron1 | | A | | TTTAATGCTTAAAA | | UUUAAUGCUUAAAA |
| STMN2_ | + | TTT | 1716 | TAGTGGATAAATAGT | 3722 | UAGUGGAUAAAUAGUA |
| intron1 | | G | | AGAAAAATGTCAGTA | | GAAAAAUGUCAGUA |
| STMN2_ | + | TTTT | 1717 | GTAGTGGATAAATAG | 3723 | GUAGUGGAUAAAUAGU |
| intron1 | | | | TAGAAAAATGTCAGT | | AGAAAAAUGUCAGU |
| STMN2_ | + | ATT | 1718 | TGTAGTGGATAAATA | 3724 | UGUAGUGGAUAAAUAG |
| intron1 | | T | | GTAGAAAAATGTCAG | | UAGAAAAAUGUCAG |
| STMN2_ | + | CTT | 1719 | TGAGATTTTGTAGTGG | 3725 | UGAGAUUUUGUAGUGG |
| intron1 | | C | | ATAAATAGTAGAAA | | AUAAAUAGUAGAAA |
| STMN2_ | + | GTT | 1720 | CTTCTGAGATTTTGTA | 3726 | CUUCUGAGAUUUUGUA |
| intron1 | | A | | GTGGATAAATAGTA | | GUGGAUAAAUAGUA |
| STMN2_ | + | TTT | 1721 | TGTTACTTCTGAGATT | 3727 | UGUUACUUCUGAGAUU |
| intron1 | | A | | TTGTAGTGGATAAA | | UUGUAGUGGAUAAA |
| STMN2_ | + | ATT | 1722 | ATGTTACTTCTGAGAT | 3728 | AUGUUACUUCUGAGAU |
| intron1 | | T | | TTTGTAGTGGATAA | | UUUGUAGUGGAUAA |
| STMN2_ | + | ATT | 1723 | TAATACCATTTATGTT | 3729 | UAAUACCAUUUAUGUU |
| intron1 | | A | | ACTTCTGAGATTTT | | ACUUCUGAGAUUUU |
| STMN2_ | + | GTT | 1724 | TTATAATACCATTTAT | 3730 | UUAUAAUACCAUUUAU |
| intron1 | | A | | GTTACTTCTGAGAT | | GUUACUUCUGAGAU |
| STMN2_ | + | ATT | 1725 | TTATTATAATACCATT | 3731 | UUAUUAUAAUACCAUU |
| intron1 | | G | | TATGTTACTTCTGA | | UAUGUUACUUCUGA |
| STMN2_ | + | ATT | 1726 | CATTGTTATTATAATA | 3732 | CAUUGUUAUUAUAAUA |
| intron1 | | A | | CCATTTATGTTACT | | CCAUUUAUGUUACU |
| STMN2_ | + | TTT | 1727 | TTACATTGTTATTATA | 3733 | UUACAUUGUUAUUAUA |
| intron1 | | A | | ATACCATTTATGTT | | AUACCAUUUAUGUU |
| STMN2_ | + | TTT | 1728 | GCAGCCGAATATTTTA | 3734 | GCAGCCGAAUAUUUUA |
| intron1 | | A | | ATGCTTAAAAATAA | | AUGCUUAAAAAUAA |
| STMN2_ | + | TTTT | 1729 | ATTACATTGTTATTAT | 3735 | AUUACAUUGUUAUUAU |
| intron1 | | | | AATACCATTTATGT | | AAUACCAUUUAUGU |
| STMN2_ | + | CTT | 1730 | TCAGTTTTATTACATT | 3736 | UCAGUUUUAUUACAUU |
| intron1 | | C | | GTTATTATAATACC | | GUUAUUAUAAUACC |
| STMN2_ | + | TTT | 1731 | CTTCTCAGTTTTATTA | 3737 | CUUCUCAGUUUUAUUA |
| intron1 | | A | | CATTGTTATTATAA | | CAUUGUUAUUAUAA |
| STMN2_ | + | TTTT | 1732 | ACTTCTCAGTTTTATT | 3738 | ACUUCUCAGUUUUAUU |
| intron1 | | | | ACATTGTTATTATA | | ACAUUGUUAUUAUA |
| STMN2_ | + | GTT | 1733 | TACTTCTCAGTTTTAT | 3739 | UACUUCUCAGUUUUAU |
| intron1 | | T | | TACATTGTTATTAT | | UACAUUGUUAUUAU |
| STMN2_ | + | ATT | 1734 | CCTGATGGTTTTACTT | 3740 | CCUGAUGGUUUUACUU |
| intron1 | | C | | CTCAGTTTTATTAC | | CUCAGUUUUAUUAC |
| STMN2_ | + | ATT | 1735 | TTCCCTGATGGTTTTA | 3741 | UUCCCUGAUGGUUUUA |
| intron1 | | A | | CTTCTCAGTTTTAT | | CUUCUCAGUUUUAU |
| STMN2_ | + | GTT | 1736 | ATTATTCCCTGATGGT | 3742 | AUUAUUCCCUGAUGGU |
| intron1 | | A | | TTTACTTCTCAGTT | | UUUACUUCUCAGUU |
| STMN2_ | + | TTTC | 1737 | AAGGAGACAGGATGA | 3743 | AAGGAGACAGGAUGAA |
| intron1 | | | | AATGAGTGGTCATAA | | AUGAGUGGUCAUAA |
| STMN2_ | + | TTTT | 1738 | CAAGGAGACAGGATG | 3744 | CAAGGAGACAGGAUGA |
| intron1 | | | | AAATGAGTGGTCATA | | AAUGAGUGGUCAUA |
| STMN2_ | + | ATT | 1739 | TCAAGGAGACAGGAT | 3745 | UCAAGGAGACAGGAUG |
| intron1 | | T | | GAAATGAGTGGTCAT | | AAAUGAGUGGUCAU |
| STMN2_ | + | CTT | 1740 | TACAATTTTCAAGGAG | 3746 | UACAAUUUUCAAGGAG |
| intron1 | | G | | ACAGGATGAAATGA | | ACAGGAUGAAAUGA |
| STMN2_ | + | TTT | 1741 | CCCTAGTGGATGAAC | 3747 | CCCUAGUGGAUGAACA |
| intron1 | | A | | AGAGCTTGTACAATT | | GAGCUUGUACAAUU |
| STMN2_ | + | CTTT | 1742 | ACCCTAGTGGATGAA | 3748 | ACCCUAGUGGAUGAAC |
| intron1 | | | | CAGAGCTTGTACAAT | | AGAGCUUGUACAAU |
| STMN2_ | + | GTT | 1743 | TATTACATTGTTATTA | 3749 | UAUUACAUUGUUAUUA |
| intron1 | | T | | TAATACCATTTATG | | UAAUACCAUUUAUG |
| STMN2_ | + | TTTT | 1744 | TTGATTACATTTTATG | 3750 | UUGAUUACAUUUUAUG |
| intron1 | | | | TAATTCTAATCCAG | | UAAUUCUAAUCCAG |
| STMN2_ | + | GTT | 1745 | ATCAATTAATCTCATG | 3751 | AUCAAUUAAUCUCAUG |
| intron1 | | T | | TATTTAGTTTATAC | | UAUUUAGUUUAUAC |
| STMN2_ | + | ATT | 1746 | CAGGATAAAACTGAA | 3752 | CAGGAUAAAACUGAAA |
| intron1 | | T | | AGAAATGGCAGTAGT | | GAAAUGGCAGUAGU |
| STMN2_ | + | GTT | 1747 | GCGGGAAAAGCTTCT | 3753 | GCGGGAAAAGCUUCUA |
| intron1 | | T | | AGAACCTAGACATGT | | GAACCUAGACAUGU |
| STMN2_ | + | TTT | 1748 | ATCGTTTGCGGGAAA | 3754 | AUCGUUUGCGGGAAAA |
| intron1 | | G | | AGCTTCTAGAACCTA | | GCUUCUAGAACCUA |
| STMN2_ | + | CTTT | 1749 | GATCGTTTGCGGGAA | 3755 | GAUCGUUUGCGGGAAA |
| intron1 | | | | AAGCTTCTAGAACCT | | AGCUUCUAGAACCU |
| STMN2_ | + | TTT | 1750 | AAGACCTTTGATCGTT | 3756 | AAGACCUUUGAUCGUU |
| intron1 | | G | | TGCGGGAAAAGCTT | | UGCGGGAAAAGCUU |
| STMN2_ | + | CTTT | 1751 | GAAGACCTTTGATCGT | 3757 | GAAGACCUUUGAUCGU |
| intron1 | | | | TTGCGGGAAAAGCT | | UUGCGGGAAAAGCU |
| STMN2_ | + | GTT | 1752 | TTTGAAGACCTTTGAT | 3758 | UUUGAAGACCUUUGAU |
| intron1 | | C | | CGTTTGCGGGAAAA | | CGUUUGCGGGAAAA |
| STMN2_ | + | TTT | 1753 | GACATAGACACAGAT | 3759 | GACAUAGACACAGAUA |
| intron1 | | A | | AAAGGGTTCTTTGAA | | AAGGGUUCUUUGAA |
| STMN2_ | + | GTT | 1754 | AGACATAGACACAGA | 3760 | AGACAUAGACACAGAU |
| intron1 | | T | | TAAAGGGTTCTTTGA | | AAAGGGUUCUUUGA |
| STMN2_ | + | ATT | 1755 | CATAGAGTGTTTAGAC | 3761 | CAUAGAGUGUUUAGAC |
| intron1 | | A | | ATAGACACAGATAA | | AUAGACACAGAUAA |
| STMN2_ | + | TTTC | 1756 | GGAAGCAAATTACAT | 3762 | GGAAGCAAAUUACAUA |
| intron1 | | | | AGAGTGTTTAGACAT | | GAGUGUUUAGACAU |
| STMN2_ | + | TTTT | 1757 | CGGAAGCAAATTACA | 3763 | CGGAAGCAAAUUACAU |
| intron1 | | | | TAGAGTGTTTAGACA | | AGAGUGUUUAGACA |
| STMN2_ | + | CTTT | 1758 | TCGGAAGCAAATTAC | 3764 | UCGGAAGCAAAUUACA |
| intron1 | | | | ATAGAGTGTTTAGAC | | UAGAGUGUUUAGAC |
| STMN2_ | + | TTTC | 1759 | TTTTCGGAAGCAAATT | 3765 | UUUUCGGAAGCAAAUU |
| intron1 | | | | ACATAGAGTGTTTA | | ACAUAGAGUGUUUA |
| STMN2_ | + | TTTT | 1760 | CTTTTCGGAAGCAAAT | 3766 | CUUUUCGGAAGCAAAU |
| intron1 | | | | TACATAGAGTGTTT | | UACAUAGAGUGUUU |
| STMN2_ | + | TTTT | 1761 | TCTTTTCGGAAGCAAA | 3767 | UCUUUUCGGAAGCAAA |
| intron1 | | | | TTACATAGAGTGTT | | UUACAUAGAGUGUU |
| STMN2_ | + | ATT | 1762 | TTCTTTTCGGAAGCAA | 3768 | UUCUUUUCGGAAGCAA |
| intron1 | | T | | ATTACATAGAGTGT | | AUUACAUAGAGUGU |
| STMN2_ | + | GTT | 1763 | ACATTTTTCTTTTCGG | 3769 | ACAUUUUUCUUUUCGG |
| intron1 | | A | | AAGCAAATTACATA | | AAGCAAAUUACAUA |
| STMN2_ | + | TTT | 1764 | AGAGAGATGGGAAAA | 3770 | AGAGAGAUGGGAAAAG |
| intron1 | | A | | GTGGGTTAACATTTT | | UGGGUUAACAUUUU |
| STMN2_ | + | TTTT | 1765 | AAGAGAGATGGGAAA | 3771 | AAGAGAGAUGGGAAAA |
| intron1 | | | | AGTGGGTTAACATTT | | GUGGGUUAACAUUU |
| STMN2_ | + | CTTT | 1766 | TAAGAGAGATGGGAA | 3772 | UAAGAGAGAUGGGAAA |
| intron1 | | | | AAGTGGGTTAACATT | | AGUGGGUUAACAUU |
| STMN2_ | + | GTT | 1767 | TGCTTTTAAGAGAGAT | 3773 | UGCUUUUAAGAGAGAU |
| intron1 | | C | | GGGAAAAGTGGGTT | | GGGAAAAGUGGGUU |
| STMN2_ | + | ATT | 1768 | TTCTGCTTTTAAGAGA | 3774 | UUCUGCUUUUAAGAGA |
| intron1 | | G | | GATGGGAAAAGTGG | | GAUGGGAAAAGUGG |
| STMN2_ | + | CTT | 1769 | CAAGAGAGACCTGAC | 3775 | CAAGAGAGACCUGACC |
| intron1 | | C | | CACTGACCCCGCCCT | | ACUGACCCCGCCCU |
| STMN2_ | + | ATT | 1770 | GAAAGGGGGTCGGGT | 3776 | GAAAGGGGGUCGGGUG |
| intron1 | | C | | GGGGAGCGCAGCGTG | | GGGAGCGCAGCGUG |
| STMN2_ | + | CTT | 1771 | ATTCGAAAGGGGGTC | 3777 | AUUCGAAAGGGGGUCG |
| intron1 | | C | | GGGTGGGGAGCGCAG | | GGUGGGGAGCGCAG |
| STMN2_ | + | TTT | 1772 | TGTGCGGACCAGCGG | 3778 | UGUGCGGACCAGCGGU |
| intron1 | | G | | TCCCGGGGGGAGGCA | | CCCGGGGGGAGGCA |
| STMN2_ | + | CTTT | 1773 | GTGTGCGGACCAGCG | 3779 | GUGUGCGGACCAGCGG |
| intron1 | | | | GTCCCGGGGGGAGGC | | UCCCGGGGGGAGGC |
| STMN2_ | + | TTT | 1774 | CGGGAAAAGCTTCTA | 3780 | CGGGAAAAGCUUCUAG |
| intron1 | | G | | GAACCTAGACATGTG | | AACCUAGACAUGUG |
| STMN2_ | + | TTTC | 1775 | TTTGTGTGCGGACCAG | 3781 | UUUGUGUGCGGACCAG |
| intron1 | | | | CGGTCCCGGGGGGA | | CGGUCCCGGGGGGA |
| STMN2_ | + | CTT | 1776 | TAGAACCTAGACATG | 3782 | UAGAACCUAGACAUGU |
| intron1 | | C | | TGTATGTATAATAAT | | GUAUGUAUAAUAAU |
| STMN2_ | + | GTT | 1777 | AGCCACGCGAAATTTC | 3783 | AGCCACGCGAAAUUUC |
| intron1 | | A | | CGTTTTGTGGGTCA | | CGUUUUGUGGGUCA |
| STMN2_ | + | CTTT | 1778 | TTTTCCCCCAGCCCAA | 3784 | UUUUCCCCCAGCCCAA |
| intron1 | | | | GCCCCCCGCCCACC | | GCCCCCCGCCCACC |
| STMN2_ | + | CTT | 1779 | TCGCCCACCCACGGTC | 3785 | UCGCCCACCCACGGUCC |
| intron1 | | C | | CGCGGAGCTCGGGG | | GCGGAGCUCGGGG |
| STMN2_ | + | ATT | 1780 | AGGGAGGGCTGTCTC | 3786 | AGGGAGGGCUGUCUCU |
| intron1 | | C | | TTCTCGCCCACCCAC | | UCUCGCCCACCCAC |
| STMN2_ | + | CTT | 1781 | CCAGGGATTCAGGGA | 3787 | CCAGGGAUUCAGGGAG |
| intron1 | | C | | GGGCTGTCTCTTCTC | | GGCUGUCUCUUCUC |
| STMN2_ | + | CTT | 1782 | ATGTGCGCAGACCCCC | 3788 | AUGUGCGCAGACCCCC |
| intron1 | | G | | GGCGTGGCTCTCAG | | GGCGUGGCUCUCAG |
| STMN2_ | + | TTTC | 1783 | AGCCCCGCAGTCCAC | 3789 | AGCCCCGCAGUCCACA |
| intron1 | | | | AACGGCCCGAGCACC | | ACGGCCCGAGCACC |
| STMN2_ | + | TTTT | 1784 | CAGCCCCGCAGTCCAC | 3790 | CAGCCCCGCAGUCCAC |
| intron1 | | | | AACGGCCCGAGCAC | | AACGGCCCGAGCAC |
| STMN2_ | + | TTTT | 1785 | TCAGCCCCGCAGTCCA | 3791 | UCAGCCCCGCAGUCCA |
| intron1 | | | | CAACGGCCCGAGCA | | CAACGGCCCGAGCA |
| STMN2_ | + | TTTT | 1786 | TTCAGCCCCGCAGTCC | 3792 | UUCAGCCCCGCAGUCC |
| intron1 | | | | ACAACGGCCCGAGC | | ACAACGGCCCGAGC |
| STMN2_ | + | CTTT | 1787 | TTTCAGCCCCGCAGTC | 3793 | UUUCAGCCCCGCAGUC |
| intron1 | | | | CACAACGGCCCGAG | | CACAACGGCCCGAG |
| STMN2_ | + | GTT | 1788 | AGCTGTATGCAGTCCT | 3794 | AGCUGUAUGCAGUCCU |
| intron1 | | G | | GGAACCTCTTTTTT | | GGAACCUCUUUUUU |
| STMN2_ | + | GTT | 1789 | CAGGATGCGGAGACA | 3795 | CAGGAUGCGGAGACAG |
| intron1 | | G | | GGGAAAGCTGCCGAA | | GGAAAGCUGCCGAA |
| STMN2_ | + | CTT | 1790 | GTTGCAGGATGCGGA | 3796 | GUUGCAGGAUGCGGAG |
| intron1 | | G | | GACAGGGAAAGCTGC | | ACAGGGAAAGCUGC |
| STMN2_ | + | GTT | 1791 | TGGCGCTCAGTGGCCC | 3797 | UGGCGCUCAGUGGCCC |
| intron1 | | C | | CGGGGTGAAAAGGC | | CGGGGUGAAAAGGC |
| STMN2_ | + | CTT | 1792 | AGTGCCCACGGTTCTG | 3798 | AGUGCCCACGGUUCUG |
| intron1 | | G | | GCGCTCAGTGGCCC | | GCGCUCAGUGGCCC |
| STMN2_ | + | CTT | 1793 | TGCCTTGAGTGCCCAC | 3799 | UGCCUUGAGUGCCCAC |
| intron1 | | G | | GGTTCTGGCGCTCA | | GGUUCUGGCGCUCA |
| STMN2_ | + | ATT | 1794 | GTCTTGTGCCTTGAGT | 3800 | GUCUUGUGCCUUGAGU |
| intron1 | | G | | GCCCACGGTTCTGG | | GCCCACGGUUCUGG |
| STMN2_ | + | CTT | 1795 | ATCCGCAATTGGTCTT | 3801 | AUCCGCAAUUGGUCUU |
| intron1 | | C | | GTGCCTTGAGTGCC | | GUGCCUUGAGUGCC |
| STMN2_ | + | ATT | 1796 | AGGGCCTTCATCCGCA | 3802 | AGGGCCUUCAUCCGCA |
| intron1 | | C | | ATTGGTCTTGTGCC | | AUUGGUCUUGUGCC |
| STMN2_ | + | ATT | 1797 | TGGATTCAGGGCCTTC | 3803 | UGGAUUCAGGGCCUUC |
| intron1 | | C | | ATCCGCAATTGGTC | | AUCCGCAAUUGGUC |
| STMN2_ | + | TTTC | 1798 | ATAAGCTCAGAGAGA | 3804 | AUAAGCUCAGAGAGAC |
| intron1 | | | | CAAGACAGTGGAGAC | | AAGACAGUGGAGAC |
| STMN2_ | + | ATT | 1799 | CATAAGCTCAGAGAG | 3805 | CAUAAGCUCAGAGAGA |
| intron1 | | T | | ACAAGACAGTGGAGA | | CAAGACAGUGGAGA |
| STMN2_ | + | TTT | 1800 | TGGGTCAGACAGTGC | 3806 | UGGGUCAGACAGUGCC |
| intron1 | | G | | CAAATATCGGCAATT | | AAAUAUCGGCAAUU |
| STMN2_ | + | TTTT | 1801 | GTGGGTCAGACAGTG | 3807 | GUGGGUCAGACAGUGC |
| intron1 | | | | CCAAATATCGGCAAT | | CAAAUAUCGGCAAU |
| STMN2_ | + | GTT | 1802 | TGTGGGTCAGACAGT | 3808 | UGUGGGUCAGACAGUG |
| intron1 | | T | | GCCAAATATCGGCAA | | CCAAAUAUCGGCAA |
| STMN2_ | + | TTTC | 1803 | CGTTTTGTGGGTCAGA | 3809 | CGUUUUGUGGGUCAGA |
| intron1 | | | | CAGTGCCAAATATC | | CAGUGCCAAAUAUC |
| STMN2_ | + | ATT | 1804 | CCGTTTTGTGGGTCAG | 3810 | CCGUUUUGUGGGUCAG |
| intron1 | | T | | ACAGTGCCAAATAT | | ACAGUGCCAAAUAU |
| STMN2_ | + | CTT | 1805 | AGTTAAGCCACGCGA | 3811 | AGUUAAGCCACGCGAA |
| intron1 | | A | | AATTTCCGTTTTGTG | | AUUUCCGUUUUGUG |
| STMN2_ | + | GTT | 1806 | CTTTGTGTGCGGACCA | 3812 | CUUUGUGUGCGGACCA |
| intron1 | | T | | GCGGTCCCGGGGGG | | GCGGUCCCGGGGGG |
| STMN2_ | + | CTT | 1807 | GAAGGCGCTGGGGTG | 3813 | GAAGGCGCUGGGGUGG |
| intron1 | | C | | GGGTTTCTTTGTGTG | | GGUUUCUUUGUGUG |
| STMN2_ | + | TTT | 1808 | GGGCAAGGGAGGGGA | 3814 | GGGCAAGGGAGGGGAA |
| intron1 | | A | | AGGAGAGAGGAAGTC | | GGAGAGAGGAAGUC |
| STMN2_ | + | CTT | 1809 | AGGGACATTTTGGAA | 3815 | AGGGACAUUUUGGAAA |
| intron1 | | A | | AGTGCTTTATAACGA | | GUGCUUUAUAACGA |
| STMN2_ | + | CTT | 1810 | AATGGGCTTAAGGGA | 3816 | AAUGGGCUUAAGGGAC |
| intron1 | | A | | CATTTTGGAAAGTGC | | AUUUUGGAAAGUGC |
| STMN2_ | + | TTT | 1811 | CCTTAAATGGGCTTAA | 3817 | CCUUAAAUGGGCUUAA |
| intron1 | | G | | GGGACATTTTGGAA | | GGGACAUUUUGGAA |
| STMN2_ | + | GTT | 1812 | GCCTTAAATGGGCTTA | 3818 | GCCUUAAAUGGGCUUA |
| intron1 | | T | | AGGGACATTTTGGA | | AGGGACAUUUUGGA |
| STMN2_ | + | CTT | 1813 | ACTGTTTGCCTTAAAT | 3819 | ACUGUUUGCCUUAAAU |
| intron1 | | A | | GGGCTTAAGGGACA | | GGGCUUAAGGGACA |
| STMN2_ | + | ATT | 1814 | GGACTCAATCGTGAG | 3820 | GGACUCAAUCGUGAGG |
| intron1 | | A | | GGGAGGAAGCTACCT | | GGAGGAAGCUACCU |
| STMN2_ | + | TTT | 1815 | AAATTAGGACTCAAT | 3821 | AAAUUAGGACUCAAUC |
| intron1 | | A | | CGTGAGGGGAGGAAG | | GUGAGGGGAGGAAG |
| STMN2_ | + | ATT | 1816 | AAAATTAGGACTCAA | 3822 | AAAAUUAGGACUCAAU |
| intron1 | | T | | TCGTGAGGGGAGGAA | | CGUGAGGGGAGGAA |
| STMN2_ | + | TTTC | 1817 | CATATTTAAAATTAGG | 3823 | CAUAUUUAAAAUUAGG |
| intron1 | | | | ACTCAATCGTGAGG | | ACUCAAUCGUGAGG |
| STMN2_ | + | GTT | 1818 | CCATATTTAAAATTAG | 3824 | CCAUAUUUAAAAUUAG |
| intron1 | | T | | GACTCAATCGTGAG | | GACUCAAUCGUGAG |
| STMN2_ | + | ATT | 1819 | TGTTTCCATATTTAAA | 3825 | UGUUUCCAUAUUUAAA |
| intron1 | | C | | ATTAGGACTCAATC | | AUUAGGACUCAAUC |
| STMN2_ | + | TTT | 1820 | TTCTGTTTCCATATTT | 3826 | UUCUGUUUCCAUAUUU |
| intron1 | | A | | AAAATTAGGACTCA | | AAAAUUAGGACUCA |
| STMN2_ | + | ATT | 1821 | ATTCTGTTTCCATATT | 3827 | AUUCUGUUUCCAUAUU |
| intron1 | | T | | TAAAATTAGGACTC | | UAAAAUUAGGACUC |
| STMN2_ | + | GTT | 1822 | CCCTCCTATGGGTAGA | 3828 | CCCUCCUAUGGGUAGA |
| intron1 | | G | | GAATTTATTCTGTT | | GAAUUUAUUCUGUU |
| STMN2_ | + | TTT | 1823 | AAAGGTAGAAGCGGG | 3829 | AAAGGUAGAAGCGGGU |
| intron1 | | A | | TAAGTTGCCCTCCTA | | AAGUUGCCCUCCUA |
| STMN2_ | + | TTTT | 1824 | AAAAGGTAGAAGCGG | 3830 | AAAAGGUAGAAGCGGG |
| intron1 | | | | GTAAGTTGCCCTCCT | | UAAGUUGCCCUCCU |
| STMN2_ | + | CTTT | 1825 | TAAAAGGTAGAAGCG | 3831 | UAAAAGGUAGAAGCGG |
| intron1 | | | | GGTAAGTTGCCCTCC | | GUAAGUUGCCCUCC |
| STMN2_ | + | TTTC | 1826 | TTTTAAAAGGTAGAA | 3832 | UUUUAAAAGGUAGAAG |
| intron1 | | | | GCGGGTAAGTTGCCC | | CGGGUAAGUUGCCC |
| STMN2_ | + | ATT | 1827 | CTTTTAAAAGGTAGA | 3833 | CUUUUAAAAGGUAGAA |
| intron1 | | T | | AGCGGGTAAGTTGCC | | GCGGGUAAGUUGCC |
| STMN2_ | + | GTT | 1828 | TGGGGGAGGTGGGAG | 3834 | UGGGGGAGGUGGGAGG |
| intron1 | | C | | GGCAGAGAAGAGGTC | | GCAGAGAAGAGGUC |
| STMN2_ | + | GTT | 1829 | ATGGTAACACAGGAC | 3835 | AUGGUAACACAGGACC |
| intron1 | | A | | CAGGAAGGACAGGGC | | AGGAAGGACAGGGC |
| STMN2_ | + | TTT | 1830 | TAAAGAAAAAGATGT | 3836 | UAAAGAAAAAGAUGUU |
| intron1 | | A | | TAATGGTAACACAGG | | AAUGGUAACACAGG |
| STMN2_ | + | TTTT | 1831 | ATAAAGAAAAAGATG | 3837 | AUAAAGAAAAAGAUGU |
| intron1 | | | | TTAATGGTAACACAG | | UAAUGGUAACACAG |
| STMN2_ | + | ATT | 1832 | TATAAAGAAAAAGAT | 3838 | UAUAAAGAAAAAGAUG |
| intron1 | | T | | GTTAATGGTAACACA | | UUAAUGGUAACACA |
| STMN2_ | + | ATT | 1833 | AGAGATATTTTATAAA | 3839 | AGAGAUAUUUUAUAAA |
| intron1 | | C | | GAAAAAGATGTTAA | | GAAAAAGAUGUUAA |
| STMN2_ | + | CTT | 1834 | AGCTCTAGAAGCATTC | 3840 | AGCUCUAGAAGCAUUC |
| intron1 | | G | | AGAGATATTTTATA | | AGAGAUAUUUUAUA |
| STMN2_ | + | ATT | 1835 | TGAGAACAAAAATAA | 3841 | UGAGAACAAAAAUAAA |
| intron1 | | A | | AAATGTTCCTCACCC | | AAUGUUCCUCACCC |
| STMN2_ | + | ATT | 1836 | TGGAAAGTGCTTTATA | 3842 | UGGAAAGUGCUUUAUA |
| intron1 | | T | | ACGACCTTTTTTTT | | ACGACCUUUUUUUU |
| STMN2_ | + | TTTT | 1837 | GGAAAGTGCTTTATA | 3843 | GGAAAGUGCUUUAUAA |
| intron1 | | | | ACGACCTTTTTTTTT | | CGACCUUUUUUUUU |
| STMN2_ | + | TTT | 1838 | GAAAGTGCTTTATAAC | 3844 | GAAAGUGCUUUAUAAC |
| intron1 | | G | | GACCTTTTTTTTTT | | GACCUUUUUUUUUU |
| STMN2_ | + | CTTT | 1839 | ATAACGACCTTTTTTT | 3845 | AUAACGACCUUUUUUU |
| intron1 | | | | TTTTTATTTCTTCT | | UUUUUAUUUCUUCU |
| STMN2_ | + | TTTT | 1840 | AGGGCAAGGGAGGGG | 3846 | AGGGCAAGGGAGGGGA |
| intron1 | | | | AAGGAGAGAGGAAGT | | AGGAGAGAGGAAGU |
| STMN2_ | + | GTT | 1841 | TAGGGCAAGGGAGGG | 3847 | UAGGGCAAGGGAGGGG |
| intron1 | | T | | GAAGGAGAGAGGAAG | | AAGGAGAGAGGAAG |
| STMN2_ | + | TTT | 1842 | TTTTAGGGCAAGGGA | 3848 | UUUUAGGGCAAGGGAG |
| intron1 | | G | | GGGGAAGGAGAGAGG | | GGGAAGGAGAGAGG |
| STMN2_ | + | CTTT | 1843 | GTTTTAGGGCAAGGG | 3849 | GUUUUAGGGCAAGGGA |
| intron1 | | | | AGGGGAAGGAGAGAG | | GGGGAAGGAGAGAG |
| STMN2_ | + | ATT | 1844 | TCTCGTCGAAGAAACC | 3850 | UCUCGUCGAAGAAACC |
| intron1 | | G | | GCTAGTCCTGGGGT | | GCUAGUCCUGGGGU |
| STMN2_ | + | TTT | 1845 | CGGTATTGTCTCGTCG | 3851 | CGGUAUUGUCUCGUCG |
| intron1 | | A | | AAGAAACCGCTAGT | | AAGAAACCGCUAGU |
| STMN2_ | + | TTTT | 1846 | ACGGTATTGTCTCGTC | 3852 | ACGGUAUUGUCUCGUC |
| intron1 | | | | GAAGAAACCGCTAG | | GAAGAAACCGCUAG |
| STMN2_ | + | ATT | 1847 | TACGGTATTGTCTCGT | 3853 | UACGGUAUUGUCUCGU |
| intron1 | | T | | CGAAGAAACCGCTA | | CGAAGAAACCGCUA |
| STMN2_ | + | TTT | 1848 | AAAGATGGGTGGAGA | 3854 | AAAGAUGGGUGGAGAC |
| intron1 | | G | | CGGGGGGAGGGGATG | | GGGGGGAGGGGAUG |
| STMN2_ | + | GTT | 1849 | GAAAGATGGGTGGAG | 3855 | GAAAGAUGGGUGGAGA |
| intron1 | | T | | ACGGGGGGAGGGGAT | | CGGGGGGAGGGGAU |
| STMN2_ | + | ATT | 1850 | CAAAGTCAAAGCGGT | 3856 | CAAAGUCAAAGCGGUC |
| intron1 | | G | | CCCATCCCGCTGTTT | | CCAUCCCGCUGUUU |
| STMN2_ | + | TTT | 1851 | AGAAGAAAATAGGAA | 3857 | AGAAGAAAAUAGGAAA |
| intron1 | | A | | AGGGGTAAAGGGAAG | | GGGGUAAAGGGAAG |
| STMN2_ | + | GTT | 1852 | AAGAAGAAAATAGGA | 3858 | AAGAAGAAAAUAGGAA |
| intron1 | | T | | AAGGGGTAAAGGGAA | | AGGGGUAAAGGGAA |
| STMN2_ | + | TTTT | 1853 | TTTCCCCCAGCCCAAG | 3859 | UUUCCCCCAGCCCAAG |
| intron1 | | | | CCCCCCGCCCACCC | | CCCCCCGCCCACCC |
| STMN2_ | + | CTT | 1854 | TCTAGTTTAAGAAGA | 3860 | UCUAGUUUAAGAAGAA |
| intron1 | | C | | AAATAGGAAAGGGGT | | AAUAGGAAAGGGGU |
| STMN2_ | + | ATT | 1855 | CTTCTCTAGTTTAAGA | 3861 | CUUCUCUAGUUUAAGA |
| intron1 | | T | | AGAAAATAGGAAAG | | AGAAAAUAGGAAAG |
| STMN2_ | + | TTT | 1856 | TTTCTTCTCTAGTTTA | 3862 | UUUCUUCUCUAGUUUA |
| intron1 | | A | | AGAAGAAAATAGGA | | AGAAGAAAAUAGGA |
| STMN2_ | + | TTTT | 1857 | ATTTCTTCTCTAGTTT | 3863 | AUUUCUUCUCUAGUUU |
| intron1 | | | | AAGAAGAAAATAGG | | AAGAAGAAAAUAGG |
| STMN2_ | + | TTTT | 1858 | TATTTCTTCTCTAGTTT | 3864 | UAUUUCUUCUCUAGUU |
| intron1 | | | | AAGAAGAAAATAG | | UAAGAAGAAAAUAG |
| STMN2_ | + | TTTT | 1859 | TTATTTCTTCTCTAGTT | 3865 | UUAUUUCUUCUCUAGU |
| intron1 | | | | TAAGAAGAAAATA | | UUAAGAAGAAAAUA |
| STMN2_ | + | TTTT | 1860 | TTTATTTCTTCTCTAGT | 3866 | UUUAUUUCUUCUCUAG |
| intron1 | | | | TTAAGAAGAAAAT | | UUUAAGAAGAAAAU |
| STMN2_ | + | TTTT | 1861 | TTTTATTTCTTCTCTAG | 3867 | UUUUAUUUCUUCUCUA |
| intron1 | | | | TTTAAGAAGAAAA | | GUUUAAGAAGAAAA |
| STMN2_ | + | TTTT | 1862 | TTTTTATTTCTTCTCTA | 3868 | UUUUUAUUUCUUCUCU |
| intron1 | | | | GTTTAAGAAGAAA | | AGUUUAAGAAGAAA |
| STMN2_ | + | TTTT | 1863 | TTTTTTATTTCTTCTCT | 3869 | UUUUUUAUUUCUUCUC |
| intron1 | | | | AGTTTAAGAAGAA | | UAGUUUAAGAAGAA |
| STMN2_ | + | TTTT | 1864 | TTTTTTTATTTCTTCTC | 3870 | UUUUUUUAUUUCUUCU |
| intron1 | | | | TAGTTTAAGAAGA | | CUAGUUUAAGAAGA |
| STMN2_ | + | TTTT | 1865 | TTTTTTTTATTTCTTCT | 3871 | UUUUUUUUAUUUCUUC |
| intron1 | | | | CTAGTTTAAGAAG | | UCUAGUUUAAGAAG |
| STMN2_ | + | CTTT | 1866 | TTTTTTTTTATTTCTTC | 3872 | UUUUUUUUUAUUUCUU |
| intron1 | | | | TCTAGTTTAAGAA | | CUCUAGUUUAAGAA |
| STMN2_ | + | TTT | 1867 | TAACGACCTTTTTTTT | 3873 | UAACGACCUUUUUUUU |
| intron1 | | A | | TTTTATTTCTTCTC | | UUUUAUUUCUUCUC |
| STMN2_ | + | TTTC | 1868 | TTCTCTAGTTTAAGAA | 3874 | UUCUCUAGUUUAAGAA |
| intron1 | | | | GAAAATAGGAAAGG | | GAAAAUAGGAAAGG |
| STMN2_ | + | TTTT | 1869 | TTCCCCCAGCCCAAGC | 3875 | UUCCCCCAGCCCAAGCC |
| intron1 | | | | CCCCCGCCCACCCT | | CCCCGCCCACCCU |
| STMN2_ | + | TTTT | 1870 | TCCCCCAGCCCAAGCC | 3876 | UCCCCCAGCCCAAGCCC |
| intron1 | | | | CCCCGCCCACCCTC | | CCCGCCCACCCUC |
| STMN2_ | + | TTTT | 1871 | CCCCCAGCCCAAGCCC | 3877 | CCCCCAGCCCAAGCCCC |
| intron1 | | | | CCCGCCCACCCTCT | | CCGCCCACCCUCU |
| STMN2_ | + | TTTC | 1872 | TGGCCATAATTTAACT | 3878 | UGGCCAUAAUUUAACU |
| intron1 | | | | GCATTTGCAAATCA | | GCAUUUGCAAAUCA |
| STMN2_ | + | CTTT | 1873 | CTGGCCATAATTTAAC | 3879 | CUGGCCAUAAUUUAAC |
| intron1 | | | | TGCATTTGCAAATC | | UGCAUUUGCAAAUC |
| STMN2_ | + | CTT | 1874 | ATACAGCCTCAATCCT | 3880 | AUACAGCCUCAAUCCU |
| intron1 | | G | | ACACAGATACATGG | | ACACAGAUACAUGG |
| STMN2_ | + | ATT | 1875 | TTGATACAGCCTCAAT | 3881 | UUGAUACAGCCUCAAU |
| intron1 | | C | | CCTACACAGATACA | | CCUACACAGAUACA |
| STMN2_ | + | CTT | 1876 | CAACTGCTGATTCTTG | 3882 | CAACUGCUGAUUCUUG |
| intron1 | | C | | ATACAGCCTCAATC | | AUACAGCCUCAAUC |
| STMN2_ | + | GTT | 1877 | TTCCAACTGCTGATTC | 3883 | UUCCAACUGCUGAUUC |
| intron1 | | C | | TTGATACAGCCTCA | | UUGAUACAGCCUCA |
| STMN2_ | + | TTTC | 1878 | CCCTGAAACTGTTCTT | 3884 | CCCUGAAACUGUUCUU |
| intron1 | | | | CCAACTGCTGATTC | | CCAACUGCUGAUUC |
| STMN2_ | + | TTTT | 1879 | CCCCTGAAACTGTTCT | 3885 | CCCCUGAAACUGUUCU |
| intron1 | | | | TCCAACTGCTGATT | | UCCAACUGCUGAUU |
| STMN2_ | + | TTTT | 1880 | TCCCCTGAAACTGTTC | 3886 | UCCCCUGAAACUGUUC |
| intron1 | | | | TTCCAACTGCTGAT | | UUCCAACUGCUGAU |
| STMN2_ | + | TTTT | 1881 | TTCCCCTGAAACTGTT | 3887 | UUCCCCUGAAACUGUU |
| intron1 | | | | CTTCCAACTGCTGA | | CUUCCAACUGCUGA |
| STMN2_ | + | GTT | 1882 | TTTCCCCTGAAACTGT | 3888 | UUUCCCCUGAAACUGU |
| intron1 | | T | | TCTTCCAACTGCTG | | UCUUCCAACUGCUG |
| STMN2_ | + | TTT | 1883 | AGTTTTTTCCCCTGAA | 3889 | AGUUUUUUCCCCUGAA |
| intron1 | | A | | ACTGTTCTTCCAAC | | ACUGUUCUUCCAAC |
| STMN2_ | + | TTTT | 1884 | AAGTTTTTTCCCCTGA | 3890 | AAGUUUUUUCCCCUGA |
| intron1 | | | | AACTGTTCTTCCAA | | AACUGUUCUUCCAA |
| STMN2_ | + | ATT | 1885 | TAAGTTTTTTCCCCTG | 3891 | UAAGUUUUUUCCCCUG |
| intron1 | | T | | AAACTGTTCTTCCA | | AAACUGUUCUUCCA |
| STMN2_ | + | TTT | 1886 | TGCACAAAATTTTAAG | 3892 | UGCACAAAAUUUUAAG |
| intron1 | | A | | TTTTTTCCCCTGAA | | UUUUUUCCCCUGAA |
| STMN2_ | + | GTT | 1887 | ATGCACAAAATTTTAA | 3893 | AUGCACAAAAUUUUAA |
| intron1 | | T | | GTTTTTTCCCCTGA | | GUUUUUUCCCCUGA |
| STMN2_ | + | GTT | 1888 | TATCTATAAATATATA | 3894 | UAUCUAUAAAUAUAUA |
| intron1 | | A | | AATATAGTTTATGC | | AAUAUAGUUUAUGC |
| STMN2_ | + | CTT | 1889 | AACATAAGGTTATATC | 3895 | AACAUAAGGUUAUAUC |
| intron1 | | C | | TATAAATATATAAA | | UAUAAAUAUAUAAA |
| STMN2_ | + | ATT | 1890 | AGATGATCTTCAACAT | 3896 | AGAUGAUCUUCAACAU |
| intron1 | | G | | AAGGTTATATCTAT | | AAGGUUAUAUCUAU |
| STMN2_ | + | TTT | 1891 | TGGCTGCAATGGGTG | 3897 | UGGCUGCAAUGGGUGA |
| intron1 | | G | | AGAATACACATATAT | | GAAUACACAUAUAU |
| STMN2_ | + | GTT | 1892 | GTGGCTGCAATGGGT | 3898 | GUGGCUGCAAUGGGUG |
| intron1 | | T | | GAGAATACACATATA | | AGAAUACACAUAUA |
| STMN2_ | + | ATT | 1893 | TTTGTGGCTGCAATGG | 3899 | UUUGUGGCUGCAAUGG |
| intron1 | | G | | GTGAGAATACACAT | | GUGAGAAUACACAU |
| STMN2_ | + | ATT | 1894 | TCTGCAAAGAATTGTT | 3900 | UCUGCAAAGAAUUGUU |
| intron1 | | C | | TGTGGCTGCAATGG | | UGUGGCUGCAAUGG |
| STMN2_ | + | ATT | 1895 | CTGGAAAATTCTCTGC | 3901 | CUGGAAAAUUCUCUGC |
| intron1 | | G | | AAAGAATTGTTTGT | | AAAGAAUUGUUUGU |
| STMN2_ | + | TTT | 1896 | TGTGCCAACGATTGCT | 3902 | UGUGCCAACGAUUGCU |
| intron1 | | G | | GGAAAATTCTCTGC | | GGAAAAUUCUCUGC |
| STMN2_ | + | GTT | 1897 | GTGTGCCAACGATTGC | 3903 | GUGUGCCAACGAUUGC |
| intron1 | | T | | TGGAAAATTCTCTG | | UGGAAAAUUCUCUG |
| STMN2_ | + | CTT | 1898 | CTAAGAGCAGGGTTT | 3904 | CUAAGAGCAGGGUUUG |
| intron1 | | G | | GTGTGCCAACGATTG | | UGUGCCAACGAUUG |
| STMN2_ | + | ATT | 1899 | AACTGCATTTGCAAAT | 3905 | AACUGCAUUUGCAAAU |
| intron1 | | T | | CATGAAAAAAACAC | | CAUGAAAAAAACAC |
| STMN2_ | + | ATT | 1900 | GCAAATCATGAAAAA | 3906 | GCAAAUCAUGAAAAAA |
| intron1 | | T | | AACACTACTTCTGCA | | ACACUACUUCUGCA |
| STMN2_ | + | TTT | 1901 | CAAATCATGAAAAAA | 3907 | CAAAUCAUGAAAAAAA |
| intron1 | | G | | ACACTACTTCTGCAG | | CACUACUUCUGCAG |
| STMN2_ | + | CTT | 1902 | TGCAGTATTAAAATA | 3908 | UGCAGUAUUAAAAUAA |
| intron1 | | C | | ATAGATTTTGAAATT | | UAGAUUUUGAAAUU |
| STMN2_ | + | TTT | 1903 | GTCAGAATTTCAGGAT | 3909 | GUCAGAAUUUCAGGAU |
| intron1 | | G | | AAAACTGAAAGAAA | | AAAACUGAAAGAAA |
| STMN2_ | + | ATT | 1904 | GGTCAGAATTTCAGG | 3910 | GGUCAGAAUUUCAGGA |
| intron1 | | T | | ATAAAACTGAAAGAA | | UAAAACUGAAAGAA |
| STMN2_ | + | CTT | 1905 | TGAATGGATATATAA | 3911 | UGAAUGGAUAUAUAAG |
| intron1 | | C | | GTAACTAGAAATGAA | | UAACUAGAAAUGAA |
| STMN2_ | + | TTTC | 1906 | TAATGAAGTGGGCAC | 3912 | UAAUGAAGUGGGCACC |
| intron1 | | | | CTTCTGAATGGATAT | | UUCUGAAUGGAUAU |
| STMN2_ | + | TTTT | 1907 | CTAATGAAGTGGGCA | 3913 | CUAAUGAAGUGGGCAC |
| intron1 | | | | CCTTCTGAATGGATA | | CUUCUGAAUGGAUA |
| STMN2_ | + | CTTT | 1908 | TCTAATGAAGTGGGC | 3914 | UCUAAUGAAGUGGGCA |
| intron1 | | | | ACCTTCTGAATGGAT | | CCUUCUGAAUGGAU |
| STMN2_ | + | ATT | 1909 | TCTTTTCTAATGAAGT | 3915 | UCUUUUCUAAUGAAGU |
| intron1 | | A | | GGGCACCTTCTGAA | | GGGCACCUUCUGAA |
| STMN2_ | + | ATT | 1910 | CCCATTATCTTTTCTA | 3916 | CCCAUUAUCUUUUCUA |
| intron1 | | C | | ATGAAGTGGGCACC | | AUGAAGUGGGCACC |
| STMN2_ | + | ATT | 1911 | TAAGAGGTGCATATA | 3917 | UAAGAGGUGCAUAUAA |
| intron1 | | G | | ATATTCCCCATTATC | | UAUUCCCCAUUAUC |
| STMN2_ | + | ATT | 1912 | AGCATGATTGTAAGA | 3918 | AGCAUGAUUGUAAGAG |
| intron1 | | C | | GGTGCATATAATATT | | GUGCAUAUAAUAUU |
| STMN2_ | + | ATT | 1913 | TGTATTCAGCATGATT | 3919 | UGUAUUCAGCAUGAUU |
| intron1 | | A | | GTAAGAGGTGCATA | | GUAAGAGGUGCAUA |
| STMN2_ | + | ATT | 1914 | AACAATTATGTATTCA | 3920 | AACAAUUAUGUAUUCA |
| intron1 | | A | | GCATGATTGTAAGA | | GCAUGAUUGUAAGA |
| STMN2_ | + | ATT | 1915 | ATTAAACAATTATGTA | 3921 | AUUAAACAAUUAUGUA |
| intron1 | | C | | TTCAGCATGATTGT | | UUCAGCAUGAUUGU |
| STMN2_ | + | GTT | 1916 | ATGTGGCTAAGATAC | 3922 | AUGUGGCUAAGAUACA |
| intron1 | | C | | ATGTGCAAGTGCTTG | | UGUGCAAGUGCUUG |
| STMN2_ | + | TTTC | 1917 | CTGATTCATTAAACAA | 3923 | CUGAUUCAUUAAACAA |
| intron1 | | | | TTATGTATTCAGCA | | UUAUGUAUUCAGCA |
| STMN2_ | + | TTTT | 1918 | TCCTGATTCATTAAAC | 3924 | UCCUGAUUCAUUAAAC |
| intron1 | | | | AATTATGTATTCAG | | AAUUAUGUAUUCAG |
| STMN2_ | + | TTTT | 1919 | TTCCTGATTCATTAAA | 3925 | UUCCUGAUUCAUUAAA |
| intron1 | | | | CAATTATGTATTCA | | CAAUUAUGUAUUCA |
| STMN2_ | + | CTTT | 1920 | TTTCCTGATTCATTAA | 3926 | UUUCCUGAUUCAUUAA |
| intron1 | | | | ACAATTATGTATTC | | ACAAUUAUGUAUUC |
| STMN2_ | + | ATT | 1921 | TCAGGGCGAGTGCTTT | 3927 | UCAGGGCGAGUGCUUU |
| intron1 | | A | | TTTCCTGATTCATT | | UUUCCUGAUUCAUU |
| STMN2_ | + | ATT | 1922 | ATTATCAGGGCGAGT | 3928 | AUUAUCAGGGCGAGUG |
| intron1 | | A | | GCTTTTTTCCTGATT | | CUUUUUUCCUGAUU |
| STMN2_ | + | TTTC | 1923 | AAAGATAATTAATTAT | 3929 | AAAGAUAAUUAAUUAU |
| intron1 | | | | CAGGGCGAGTGCTT | | CAGGGCGAGUGCUU |
| STMN2_ | + | ATT | 1924 | CAAAGATAATTAATT | 3930 | CAAAGAUAAUUAAUUA |
| intron1 | | T | | ATCAGGGCGAGTGCT | | UCAGGGCGAGUGCU |
| STMN2_ | + | ATT | 1925 | CAATTTCAAAGATAAT | 3931 | CAAUUUCAAAGAUAAU |
| intron1 | | C | | TAATTATCAGGGCG | | UAAUUAUCAGGGCG |
| STMN2_ | + | ATT | 1926 | ATTCCAATTTCAAAGA | 3932 | AUUCCAAUUUCAAAGA |
| intron1 | | A | | TAATTAATTATCAG | | UAAUUAAUUAUCAG |
| STMN2_ | + | TTT | 1927 | AAATTAATTCCAATTT | 3933 | AAAUUAAUUCCAAUUU |
| intron1 | | G | | CAAAGATAATTAAT | | CAAAGAUAAUUAAU |
| STMN2_ | + | TTTT | 1928 | GAAATTAATTCCAATT | 3934 | GAAAUUAAUUCCAAUU |
| intron1 | | | | TCAAAGATAATTAA | | UCAAAGAUAAUUAA |
| STMN2_ | + | ATT | 1929 | TGAAATTAATTCCAAT | 3935 | UGAAAUUAAUUCCAAU |
| intron1 | | T | | TTCAAAGATAATTA | | UUCAAAGAUAAUUA |
| STMN2_ | + | ATT | 1930 | AAATAATAGATTTTGA | 3936 | AAAUAAUAGAUUUUGA |
| intron1 | | A | | AATTAATTCCAATT | | AAUUAAUUCCAAUU |
| STMN2_ | + | TTTT | 1931 | CCTGATTCATTAAACA | 3937 | CCUGAUUCAUUAAACA |
| intron1 | | | | ATTATGTATTCAGC | | AUUAUGUAUUCAGC |
| STMN2_ | + | TTTC | 1932 | AGGATAAAACTGAAA | 3938 | AGGAUAAAACUGAAAG |
| intron1 | | | | GAAATGGCAGTAGTT | | AAAUGGCAGUAGUU |
| STMN2_ | + | ATT | 1933 | TGTATGTTCATGTGGC | 3939 | UGUAUGUUCAUGUGGC |
| intron1 | | A | | TAAGATACATGTGC | | UAAGAUACAUGUGC |
| STMN2_ | + | TTT | 1934 | CTTCCTGCCAGGATTA | 3940 | CUUCCUGCCAGGAUUA |
| intron1 | | G | | TGTATGTTCATGTG | | UGUAUGUUCAUGUG |
| STMN2_ | + | TTT | 1935 | ATGATTCAGTAGCCTT | 3941 | AUGAUUCAGUAGCCUU |
| intron1 | | A | | GTTTGTTCTCATTT | | GUUUGUUCUCAUUU |
| STMN2_ | + | ATT | 1936 | AATGATTCAGTAGCCT | 3942 | AAUGAUUCAGUAGCCU |
| intron1 | | T | | TGTTTGTTCTCATT | | UGUUUGUUCUCAUU |
| STMN2_ | + | ATT | 1937 | TTTAATGATTCAGTAG | 3943 | UUUAAUGAUUCAGUAG |
| intron1 | | A | | CCTTGTTTGTTCTC | | CCUUGUUUGUUCUC |
| STMN2_ | + | GTT | 1938 | TTATTTAATGATTCAG | 3944 | UUAUUUAAUGAUUCAG |
| intron1 | | A | | TAGCCTTGTTTGTT | | UAGCCUUGUUUGUU |
| STMN2_ | + | GTT | 1939 | TTATTATTTAATGATT | 3945 | UUAUUAUUUAAUGAUU |
| intron1 | | G | | CAGTAGCCTTGTTT | | CAGUAGCCUUGUUU |
| STMN2_ | + | TTTC | 1940 | AAATCGTTGTTATTAT | 3946 | AAAUCGUUGUUAUUAU |
| intron1 | | | | TTAATGATTCAGTA | | UUAAUGAUUCAGUA |
| STMN2_ | + | ATT | 1941 | CAAATCGTTGTTATTA | 3947 | CAAAUCGUUGUUAUUA |
| intron1 | | T | | TTTAATGATTCAGT | | UUUAAUGAUUCAGU |
| STMN2_ | + | ATT | 1942 | TCATTTCAAATCGTTG | 3948 | UCAUUUCAAAUCGUUG |
| intron1 | | A | | TTATTATTTAATGA | | UUAUUAUUUAAUGA |
| STMN2_ | + | ATT | 1943 | TTATCATTTCAAATCG | 3949 | UUAUCAUUUCAAAUCG |
| intron1 | | A | | TTGTTATTATTTAA | | UUGUUAUUAUUUAA |
| STMN2_ | + | TTTC | 1944 | CGCTGCAGGCTAGTG | 3950 | CGCUGCAGGCUAGUGG |
| intron1 | | | | GCTGCAAACTCATCG | | CUGCAAACUCAUCG |
| STMN2_ | + | GTT | 1945 | CCGCTGCAGGCTAGTG | 3951 | CCGCUGCAGGCUAGUG |
| intron1 | | T | | GCTGCAAACTCATC | | GCUGCAAACUCAUC |
| STMN2_ | + | TTTC | 1946 | TGCACCCCTCAGAAA | 3952 | UGCACCCCUCAGAAAG |
| intron1 | | | | GGTTTCCGCTGCAGG | | GUUUCCGCUGCAGG |
| STMN2_ | + | CTTT | 1947 | CTGCACCCCTCAGAAA | 3953 | CUGCACCCCUCAGAAA |
| intron1 | | | | GGTTTCCGCTGCAG | | GGUUUCCGCUGCAG |
| STMN2_ | + | GTT | 1948 | TGAGAATGGGTGGTG | 3954 | UGAGAAUGGGUGGUGG |
| intron1 | | C | | GGGGCGATCTCGCCT | | GGGCGAUCUCGCCU |
| STMN2_ | + | GTT | 1949 | ACTCGCACGTCCAGA | 3955 | ACUCGCACGUCCAGAA |
| intron1 | | C | | AAGGTTCTGAGAATG | | AGGUUCUGAGAAUG |
| STMN2_ | + | ATT | 1950 | GCAGTTCACTCGCACG | 3956 | GCAGUUCACUCGCACG |
| intron1 | | C | | TCCAGAAAGGTTCT | | UCCAGAAAGGUUCU |
| STMN2_ | + | TTTC | 1951 | CACAATTCGCAGTTCA | 3957 | CACAAUUCGCAGUUCA |
| intron1 | | | | CTCGCACGTCCAGA | | CUCGCACGUCCAGA |
| STMN2_ | + | CTTT | 1952 | CCACAATTCGCAGTTC | 3958 | CCACAAUUCGCAGUUC |
| intron1 | | | | ACTCGCACGTCCAG | | ACUCGCACGUCCAG |
| STMN2_ | + | TTTC | 1953 | TGCGCAGTGTCCTGAG | 3959 | UGCGCAGUGUCCUGAG |
| intron1 | | | | CTACCCCCGCTTTC | | CUACCCCCGCUUUC |
| STMN2_ | + | GTT | 1954 | CTGCGCAGTGTCCTGA | 3960 | CUGCGCAGUGUCCUGA |
| intron1 | | T | | GCTACCCCCGCTTT | | GCUACCCCCGCUUU |
| STMN2_ | + | GTT | 1955 | GGCGCTCGCCCCCGCG | 3961 | GGCGCUCGCCCCCGCG |
| intron1 | | G | | GTGCAGCCGGGGAG | | GUGCAGCCGGGGAG |
| STMN2_ | + | CTT | 1956 | TCTAAGGGAGACCCTC | 3962 | UCUAAGGGAGACCCUC |
| intron1 | | C | | GCTCCTCCAGCGGG | | GCUCCUCCAGCGGG |
| STMN2_ | + | TTTC | 1957 | CAGAATGGAGACCCC | 3963 | CAGAAUGGAGACCCCG |
| intron1 | | | | GCGAGGGGCTTCTCT | | CGAGGGGCUUCUCU |
| STMN2_ | + | TTTT | 1958 | CCAGAATGGAGACCC | 3964 | CCAGAAUGGAGACCCC |
| intron1 | | | | CGCGAGGGGCTTCTC | | GCGAGGGGCUUCUC |
| STMN2_ | + | ATT | 1959 | TCCAGAATGGAGACC | 3965 | UCCAGAAUGGAGACCC |
| intron1 | | T | | CCGCGAGGGGCTTCT | | CGCGAGGGGCUUCU |
| STMN2_ | + | GTT | 1960 | TCTATGATTTTCCAGA | 3966 | UCUAUGAUUUUCCAGA |
| intron1 | | C | | ATGGAGACCCCGCG | | AUGGAGACCCCGCG |
| STMN2_ | + | TTTC | 1961 | CCCCAGCCCAAGCCCC | 3967 | CCCCAGCCCAAGCCCCC |
| intron1 | | | | CCGCCCACCCTCTG | | CGCCCACCCUCUG |
| STMN2_ | + | ATT | 1962 | AGTAGCCTTGTTTGTT | 3968 | AGUAGCCUUGUUUGUU |
| intron1 | | C | | CTCATTTGTTCAAA | | CUCAUUUGUUCAAA |
| STMN2_ | + | CTT | 1963 | TTTGTTCTCATTTGTTC | 3969 | UUUGUUCUCAUUUGUU |
| intron1 | | G | | AAAAGGGACGTGG | | CAAAAGGGACGUGG |
| STMN2_ | + | GTT | 1964 | GTTCTCATTTGTTCAA | 3970 | GUUCUCAUUUGUUCAA |
| intron1 | | T | | AAGGGACGTGGATT | | AAGGGACGUGGAUU |
| STMN2_ | + | TTT | 1965 | TTCTCATTTGTTCAAA | 3971 | UUCUCAUUUGUUCAAA |
| intron1 | | G | | AGGGACGTGGATTG | | AGGGACGUGGAUUG |
| STMN2_ | + | TTTT | 1966 | GCTTCCTGCCAGGATT | 3972 | GCUUCCUGCCAGGAUU |
| intron1 | | | | ATGTATGTTCATGT | | AUGUAUGUUCAUGU |
| STMN2_ | + | TTTT | 1967 | TGCTTCCTGCCAGGAT | 3973 | UGCUUCCUGCCAGGAU |
| intron1 | | | | TATGTATGTTCATG | | UAUGUAUGUUCAUG |
| STMN2_ | + | ATT | 1968 | TTGCTTCCTGCCAGGA | 3974 | UUGCUUCCUGCCAGGA |
| intron1 | | T | | TTATGTATGTTCAT | | UUAUGUAUGUUCAU |
| STMN2_ | + | GTT | 1969 | TAAAGCAAATATATTT | 3975 | UAAAGCAAAUAUAUUU |
| intron1 | | A | | TTGCTTCCTGCCAG | | UUGCUUCCUGCCAG |
| STMN2_ | + | TTT | 1970 | AGTTATAAAGCAAAT | 3976 | AGUUAUAAAGCAAAUA |
| intron1 | | A | | ATATTTTTGCTTCCT | | UAUUUUUGCUUCCU |
| STMN2_ | + | TTTT | 1971 | AAGTTATAAAGCAAA | 3977 | AAGUUAUAAAGCAAAU |
| intron1 | | | | TATATTTTTGCTTCC | | AUAUUUUUGCUUCC |
| STMN2_ | + | ATT | 1972 | TAAGTTATAAAGCAA | 3978 | UAAGUUAUAAAGCAAA |
| intron1 | | T | | ATATATTTTTGCTTC | | UAUAUUUUUGCUUC |
| STMN2_ | + | GTT | 1973 | ATTTTAAGTTATAAAG | 3979 | AUUUUAAGUUAUAAAG |
| intron1 | | C | | CAAATATATTTTTG | | CAAAUAUAUUUUUG |
| STMN2_ | + | GTT | 1974 | TTCATTTTAAGTTATA | 3980 | UUCAUUUUAAGUUAUA |
| intron1 | | G | | AAGCAAATATATTT | | AAGCAAAUAUAUUU |
| STMN2_ | + | TTT | 1975 | TCTCCAGTTGTTCATT | 3981 | UCUCCAGUUGUUCAUU |
| intron1 | | G | | TTAAGTTATAAAGC | | UUAAGUUAUAAAGC |
| STMN2_ | + | ATT | 1976 | GTCTCCAGTTGTTCAT | 3982 | GUCUCCAGUUGUUCAU |
| intron1 | | T | | TTTAAGTTATAAAG | | UUUAAGUUAUAAAG |
| STMN2_ | + | TTTC | 1977 | CCCCACAAAAAGGTA | 3983 | CCCCACAAAAAGGUAA |
| intron1 | | | | AATTTGTCTCCAGTT | | AUUUGUCUCCAGUU |
| STMN2_ | + | CTTT | 1978 | CCCCCACAAAAAGGT | 3984 | CCCCCACAAAAAGGUA |
| intron1 | | | | AAATTTGTCTCCAGT | | AAUUUGUCUCCAGU |
| STMN2_ | + | CTT | 1979 | CTGCCAGGATTATGTA | 3985 | CUGCCAGGAUUAUGUA |
| intron1 | | C | | TGTTCATGTGGCTA | | UGUUCAUGUGGCUA |
| STMN2_ | + | ATT | 1980 | CCCTCATCCCTTTCCC | 3986 | CCCUCAUCCCUUUCCCC |
| intron1 | | G | | CCACAAAAAGGTAA | | CACAAAAAGGUAA |
| STMN2_ | + | TTT | 1981 | CTTCCTCCTAATTGCC | 3987 | CUUCCUCCUAAUUGCC |
| intron1 | | G | | CTCATCCCTTTCCC | | CUCAUCCCUUUCCC |
| STMN2_ | + | CTTT | 1982 | GCTTCCTCCTAATTGC | 3988 | GCUUCCUCCUAAUUGC |
| intron1 | | | | CCTCATCCCTTTCC | | CCUCAUCCCUUUCC |
| STMN2_ | + | GTT | 1983 | GCTTTGCTTCCTCCTA | 3989 | GCUUUGCUUCCUCCUA |
| intron1 | | C | | ATTGCCCTCATCCC | | AUUGCCCUCAUCCC |
| STMN2_ | + | GTT | 1984 | CGTTCGCTTTGCTTCC | 3990 | CGUUCGCUUUGCUUCC |
| intron1 | | G | | TCCTAATTGCCCTC | | UCCUAAUUGCCCUC |
| STMN2_ | + | CTT | 1985 | TTGCGTTCGCTTTGCT | 3991 | UUGCGUUCGCUUUGCU |
| intron1 | | G | | TCCTCCTAATTGCC | | UCCUCCUAAUUGCC |
| STMN2_ | + | ATT | 1986 | ACCCTTGTTGCGTTCG | 3992 | ACCCUUGUUGCGUUCG |
| intron1 | | A | | CTTTGCTTCCTCCT | | CUUUGCUUCCUCCU |
| STMN2_ | + | GTT | 1987 | AGGATTAACCCTTGTT | 3993 | AGGAUUAACCCUUGUU |
| intron1 | | A | | GCGTTCGCTTTGCT | | GCGUUCGCUUUGCU |
| STMN2_ | + | CTT | 1988 | GTTAAGGATTAACCCT | 3994 | GUUAAGGAUUAACCCU |
| intron1 | | G | | TGTTGCGTTCGCTT | | UGUUGCGUUCGCUU |
| STMN2_ | + | ATT | 1989 | CTCTTGGTTAAGGATT | 3995 | CUCUUGGUUAAGGAUU |
| intron1 | | G | | AACCCTTGTTGCGT | | AACCCUUGUUGCGU |
| STMN2_ | + | GTT | 1990 | AAAAGGGACGTGGAT | 3996 | AAAAGGGACGUGGAUU |
| intron1 | | C | | TGCTCTTGGTTAAGG | | GCUCUUGGUUAAGG |
| STMN2_ | + | TTT | 1991 | TTCAAAAGGGACGTG | 3997 | UUCAAAAGGGACGUGG |
| intron1 | | G | | GATTGCTCTTGGTTA | | AUUGCUCUUGGUUA |
| STMN2_ | + | ATT | 1992 | GTTCAAAAGGGACGT | 3998 | GUUCAAAAGGGACGUG |
| intron1 | | T | | GGATTGCTCTTGGTT | | GAUUGCUCUUGGUU |
| STMN2_ | + | GTT | 1993 | TCATTTGTTCAAAAGG | 3999 | UCAUUUGUUCAAAAGG |
| intron1 | | C | | GACGTGGATTGCTC | | GACGUGGAUUGCUC |
| STMN2_ | + | CTT | 1994 | CTCCTAATTGCCCTCA | 4000 | CUCCUAAUUGCCCUCA |
| intron1 | | C | | TCCCTTTCCCCCAC | | UCCCUUUCCCCCAC |
| STMN2_ | + | TTTT | 1995 | TGATTACATTTTATGT | 4001 | UGAUUACAUUUUAUGU |
| intron1 | | | | AATTCTAATCCAGC | | AAUUCUAAUCCAGC |
| STMN2_ | + | TTT | 1996 | ACTGCATTTGCAAATC | 4002 | ACUGCAUUUGCAAAUC |
| intron1 | | A | | ATGAAAAAAACACT | | AUGAAAAAAACACU |
| STMN2_ | + | TTT | 1997 | ATTACATTTTATGTAA | 4003 | AUUACAUUUUAUGUAA |
| intron1 | | G | | TTCTAATCCAGCTA | | UUCUAAUCCAGCUA |
| STMN2_ | + | GTT | 1998 | GCACATTAACCATTAG | 4004 | GCACAUUAACCAUUAG |
| intron1 | | C | | TACAAGTACCCAAT | | UACAAGUACCCAAU |
| STMN2_ | + | GTT | 1999 | GAGTTCGCACATTAAC | 4005 | GAGUUCGCACAUUAAC |
| intron1 | | G | | CATTAGTACAAGTA | | CAUUAGUACAAGUA |
| STMN2_ | + | TTT | 2000 | GATGTTGGAGTTCGCA | 4006 | GAUGUUGGAGUUCGCA |
| intron1 | | G | | CATTAACCATTAGT | | CAUUAACCAUUAGU |
| STMN2_ | + | TTTT | 2001 | GGATGTTGGAGTTCGC | 4007 | GGAUGUUGGAGUUCGC |
| intron1 | | | | ACATTAACCATTAG | | ACAUUAACCAUUAG |
| STMN2_ | + | ATT | 2002 | TGGATGTTGGAGTTCG | 4008 | UGGAUGUUGGAGUUCG |
| intron1 | | T | | CACATTAACCATTA | | CACAUUAACCAUUA |
| STMN2_ | + | ATT | 2003 | TATTTTGGATGTTGGA | 4009 | UAUUUUGGAUGUUGGA |
| intron1 | | G | | GTTCGCACATTAAC | | GUUCGCACAUUAAC |
| STMN2_ | + | CTT | 2004 | TGGAATAATTGTATTT | 4010 | UGGAAUAAUUGUAUUU |
| intron1 | | C | | TGGATGTTGGAGTT | | UGGAUGUUGGAGUU |
| STMN2_ | + | ATT | 2005 | TTCTGGAATAATTGTA | 4011 | UUCUGGAAUAAUUGUA |
| intron1 | | C | | TTTTGGATGTTGGA | | UUUUGGAUGUUGGA |
| STMN2_ | + | GTT | 2006 | TTCTTCTGGAATAATT | 4012 | UUCUUCUGGAAUAAUU |
| intron1 | | A | | GTATTTTGGATGTT | | GUAUUUUGGAUGUU |
| STMN2_ | + | TTT | 2007 | GCAGTTATTCTTCTGG | 4013 | GCAGUUAUUCUUCUGG |
| intron1 | | A | | AATAATTGTATTTT | | AAUAAUUGUAUUUU |
| STMN2_ | + | ATT | 2008 | AGCAGTTATTCTTCTG | 4014 | AGCAGUUAUUCUUCUG |
| intron1 | | T | | GAATAATTGTATTT | | GAAUAAUUGUAUUU |
| STMN2_ | + | ATT | 2009 | TAAAGCAACGCCTGC | 4015 | UAAAGCAACGCCUGCA |
| intron1 | | G | | AAGAGTGCCCATTTA | | AGAGUGCCCAUUUA |
| STMN2_ | + | TTT | 2010 | CAAAGATTGTAAAGC | 4016 | CAAAGAUUGUAAAGCA |
| intron1 | | A | | AACGCCTGCAAGAGT | | ACGCCUGCAAGAGU |
| STMN2_ | + | TTTT | 2011 | ACAAAGATTGTAAAG | 4017 | ACAAAGAUUGUAAAGC |
| intron1 | | | | CAACGCCTGCAAGAG | | AACGCCUGCAAGAG |
| STMN2_ | + | TTTT | 2012 | TACAAAGATTGTAAA | 4018 | UACAAAGAUUGUAAAG |
| intron1 | | | | GCAACGCCTGCAAGA | | CAACGCCUGCAAGA |
| STMN2_ | + | TTTT | 2013 | TTACAAAGATTGTAA | 4019 | UUACAAAGAUUGUAAA |
| intron1 | | | | AGCAACGCCTGCAAG | | GCAACGCCUGCAAG |
| STMN2_ | + | TTTT | 2014 | TTTACAAAGATTGTAA | 4020 | UUUACAAAGAUUGUAA |
| intron1 | | | | AGCAACGCCTGCAA | | AGCAACGCCUGCAA |
| STMN2_ | + | TTTT | 2015 | TTTTACAAAGATTGTA | 4021 | UUUUACAAAGAUUGUA |
| intron1 | | | | AAGCAACGCCTGCA | | AAGCAACGCCUGCA |
| STMN2_ | + | TTTT | 2016 | TTTTTACAAAGATTGT | 4022 | UUUUUACAAAGAUUGU |
| intron1 | | | | AAAGCAACGCCTGC | | AAAGCAACGCCUGC |
| STMN2_ | + | TTTT | 2017 | TTTTTTACAAAGATTG | 4023 | UUUUUUACAAAGAUUG |
| intron1 | | | | TAAAGCAACGCCTG | | UAAAGCAACGCCUG |
| STMN2_ | + | TTTT | 2018 | TTTTTTTACAAAGATT | 4024 | UUUUUUUACAAAGAUU |
| intron1 | | | | GTAAAGCAACGCCT | | GUAAAGCAACGCCU |
| STMN2_ | + | TTTT | 2019 | TTTTTTTTACAAAGAT | 4025 | UUUUUUUUACAAAGAU |
| intron1 | | | | TGTAAAGCAACGCC | | UGUAAAGCAACGCC |
| STMN2_ | + | TTTT | 2020 | TTTTTTTTTACAAAGA | 4026 | UUUUUUUUUACAAAGA |
| intron1 | | | | TTGTAAAGCAACGC | | UUGUAAAGCAACGC |
| STMN2_ | + | ATT | 2021 | TTTTTTTTTTAGAAAG | 4027 | UUUUUUUUUUACAAAG |
| intron1 | | T | | ATTGTAAAGCAACG | | AUUGUAAAGCAACG |
| STMN2_ | + | ATT | 2022 | CCTAGGACTGAATGA | 4028 | CCUAGGACUGAAUGAU |
| intron1 | | G | | TTTTTTTTTTTTTAC | | UUUUUUUUUUUUAC |
| STMN2_ | + | TTT | 2023 | TAGGGCAAAAATATT | 4029 | UAGGGCAAAAAUAUUG |
| intron1 | | A | | GCCTAGGACTGAATG | | CCUAGGACUGAAUG |
| STMN2_ | + | TTTT | 2024 | ATAGGGCAAAAATAT | 4030 | AUAGGGCAAAAAUAUU |
| intron1 | | | | TGCCTAGGACTGAAT | | GCCUAGGACUGAAU |
| STMN2_ | + | ATT | 2025 | ACCATTAGTACAAGT | 4031 | ACCAUUAGUACAAGUA |
| intron1 | | A | | ACCCAATATAACAAT | | CCCAAUAUAACAAU |
| STMN2_ | + | TTTT | 2026 | TATAGGGCAAAAATA | 4032 | UAUAGGGCAAAAAUAU |
| intron1 | | | | TTGCCTAGGACTGAA | | UGCCUAGGACUGAA |
| STMN2_ | + | ATT | 2027 | GTACAAGTACCCAAT | 4033 | GUACAAGUACCCAAUA |
| intron1 | | A | | ATAACAATAGATCAT | | UAACAAUAGAUCAU |
| STMN2_ | + | TTTT | 2028 | AGTTGTATGTCTTTAT | 4034 | AGUUGUAUGUCUUUAU |
| intron1 | | | | ATCAGGATAAAGAG | | AUCAGGAUAAAGAG |
| STMN2_ | + | TTTC | 2029 | CTTATGAAATGCAGCC | 4035 | CUUAUGAAAUGCAGCC |
| intron1 | | | | ATAAAGTTTAACTT | | AUAAAGUUUAACUU |
| STMN2_ | + | TTTT | 2030 | CCTTATGAAATGCAGC | 4036 | CCUUAUGAAAUGCAGC |
| intron1 | | | | CATAAAGTTTAACT | | CAUAAAGUUUAACU |
| STMN2_ | + | TTTT | 2031 | TCCTTATGAAATGCAG | 4037 | UCCUUAUGAAAUGCAG |
| intron1 | | | | CCATAAAGTTTAAC | | CCAUAAAGUUUAAC |
| STMN2_ | + | TTTT | 2032 | TTCCTTATGAAATGCA | 4038 | UUCCUUAUGAAAUGCA |
| intron1 | | | | GCCATAAAGTTTAA | | GCCAUAAAGUUUAA |
| STMN2_ | + | TTTT | 2033 | TTTCCTTATGAAATGC | 4039 | UUUCCUUAUGAAAUGC |
| intron1 | | | | AGCCATAAAGTTTA | | AGCCAUAAAGUUUA |
| STMN2_ | + | TTTT | 2034 | TTTTCCTTATGAAATG | 4040 | UUUUCCUUAUGAAAUG |
| intron1 | | | | CAGCCATAAAGTTT | | CAGCCAUAAAGUUU |
| STMN2_ | + | GTT | 2035 | TTTTTCCTTATGAAAT | 4041 | UUUUUCCUUAUGAAAU |
| intron1 | | T | | GCAGCCATAAAGTT | | GCAGCCAUAAAGUU |
| STMN2_ | + | TTT | 2036 | GAAGTTTTTTTTCCTT | 4042 | GAAGUUUUUUUUCCUU |
| intron1 | | G | | ATGAAATGCAGCCA | | AUGAAAUGCAGCCA |
| STMN2_ | + | CTTT | 2037 | GGAAGTTTTTTTTCCT | 4043 | GGAAGUUUUUUUUCCU |
| intron1 | | | | TATGAAATGCAGCC | | UAUGAAAUGCAGCC |
| STMN2_ | + | ATT | 2038 | TACTCTGTCTTTGGAA | 4044 | UACUCUGUCUUUGGAA |
| intron1 | | C | | GTTTTTTTTCCTTA | | GUUUUUUUUCCUUA |
| STMN2_ | + | ATT | 2039 | GCATTCTACTCTGTCT | 4045 | GCAUUCUACUCUGUCU |
| intron1 | | A | | TTGGAAGTTTTTTT | | UUGGAAGUUUUUUU |
| STMN2_ | + | TTT | 2040 | TTAGCATTCTACTCTG | 4046 | UUAGCAUUCUACUCUG |
| intron1 | | A | | TCTTTGGAAGTTTT | | UCUUUGGAAGUUUU |
| STMN2_ | + | TTTT | 2041 | ATTAGCATTCTACTCT | 4047 | AUUAGCAUUCUACUCU |
| intron1 | | | | GTCTTTGGAAGTTT | | GUCUUUGGAAGUUU |
| STMN2_ | + | TTTT | 2042 | TATTAGCATTCTACTC | 4048 | UAUUAGCAUUCUACUC |
| intron1 | | | | TGTCTTTGGAAGTT | | UGUCUUUGGAAGUU |
| STMN2_ | + | ATT | 2043 | TTATTAGCATTCTACT | 4049 | UUAUUAGCAUUCUACU |
| intron1 | | T | | CTGTCTTTGGAAGT | | CUGUCUUUGGAAGU |
| STMN2_ | + | ATT | 2044 | AATTTTTATTAGCATT | 4050 | AAUUUUUAUUAGCAUU |
| intron1 | | A | | CTACTCTGTCTTTG | | CUACUCUGUCUUUG |
| STMN2_ | + | GTT | 2045 | AAGTGTAAATTAAATT | 4051 | AAGUGUAAAUUAAAUU |
| intron1 | | A | | TTTATTAGCATTCT | | UUUAUUAGCAUUCU |
| STMN2_ | + | TTT | 2046 | CAAGAGAGCATGTTA | 4052 | CAAGAGAGCAUGUUAA |
| intron1 | | A | | AAGTGTAAATTAAAT | | AGUGUAAAUUAAAU |
| STMN2_ | + | TTTT | 2047 | ACAAGAGAGCATGTT | 4053 | ACAAGAGAGCAUGUUA |
| intron1 | | | | AAAGTGTAAATTAAA | | AAGUGUAAAUUAAA |
| STMN2_ | + | CTTT | 2048 | TACAAGAGAGCATGT | 4054 | UACAAGAGAGCAUGUU |
| intron1 | | | | TAAAGTGTAAATTAA | | AAAGUGUAAAUUAA |
| STMN2_ | + | TTT | 2049 | TCTAAACCTAGTCCCA | 4055 | UCUAAACCUAGUCCCA |
| intron1 | | A | | CAAATACTTTTACA | | CAAAUACUUUUACA |
| STMN2_ | + | ATT | 2050 | ATCTAAACCTAGTCCC | 4056 | AUCUAAACCUAGUCCC |
| intron1 | | T | | ACAAATACTTTTAC | | ACAAAUACUUUUAC |
| STMN2_ | + | ATT | 2051 | AGTGAAATTTATCTAA | 4057 | AGUGAAAUUUAUCUAA |
| intron1 | | G | | ACCTAGTCCCACAA | | ACCUAGUCCCACAA |
| STMN2_ | + | TTT | 2052 | TATCAGGATAAAGAG | 4058 | UAUCAGGAUAAAGAGA |
| intron1 | | A | | AATTGAGTGAAATTT | | AUUGAGUGAAAUUU |
| STMN2_ | + | CTTT | 2053 | ATATCAGGATAAAGA | 4059 | AUAUCAGGAUAAAGAG |
| intron1 | | | | GAATTGAGTGAAATT | | AAUUGAGUGAAAUU |
| STMN2_ | + | GTT | 2054 | TATGTCTTTATATCAG | 4060 | UAUGUCUUUAUAUCAG |
| intron1 | | G | | GATAAAGAGAATTG | | GAUAAAGAGAAUUG |
| STMN2_ | + | TTT | 2055 | GTTGTATGTCTTTATA | 4061 | GUUGUAUGUCUUUAUA |
| intron1 | | A | | TCAGGATAAAGAGA | | UCAGGAUAAAGAGA |
| STMN2_ | + | CTTT | 2056 | TAGTTGTATGTCTTTA | 4062 | UAGUUGUAUGUCUUUA |
| intron1 | | | | TATCAGGATAAAGA | | UAUCAGGAUAAAGA |
| STMN2_ | + | ATT | 2057 | TTATAGGGCAAAAAT | 4063 | UUAUAGGGCAAAAAUA |
| intron1 | | T | | ATTGCCTAGGACTGA | | UUGCCUAGGACUGA |
| STMN2_ | + | TTT | 2058 | TTTTTATAGGGCAAAA | 4064 | UUUUUAUAGGGCAAAA |
| intron1 | | A | | ATATTGCCTAGGAC | | AUAUUGCCUAGGAC |
| STMN2_ | + | ATT | 2059 | ATTTTTATAGGGCAAA | 4065 | AUUUUUAUAGGGCAAA |
| intron1 | | T | | AATATTGCCTAGGA | | AAUAUUGCCUAGGA |
| STMN2_ | + | TTTC | 2060 | AGCCATCATTTTGCTG | 4066 | AGCCAUCAUUUUGCUG |
| intron1 | | | | GTCATGTGGAAATA | | GUCAUGUGGAAAUA |
| STMN2_ | + | ATT | 2061 | CAGCCATCATTTTGCT | 4067 | CAGCCAUCAUUUUGCU |
| intron1 | | T | | GGTCATGTGGAAAT | | GGUCAUGUGGAAAU |
| STMN2_ | + | ATT | 2062 | ATGCATTTCAGCCATC | 4068 | AUGCAUUUCAGCCAUC |
| intron1 | | A | | ATTTTGCTGGTCAT | | AUUUUGCUGGUCAU |
| STMN2_ | + | GTT | 2063 | ATTAATGCATTTCAGC | 4069 | AUUAAUGCAUUUCAGC |
| intron1 | | A | | CATCATTTTGCTGG | | CAUCAUUUUGCUGG |
| STMN2_ | + | TTT | 2064 | TATGAGTGTAAAGGTT | 4070 | UAUGAGUGUAAAGGUU |
| intron1 | | A | | AATTAATGCATTTC | | AAUUAAUGCAUUUC |
| STMN2_ | + | TTTT | 2065 | ATATGAGTGTAAAGG | 4071 | AUAUGAGUGUAAAGGU |
| intron1 | | | | TTAATTAATGCATTT | | UAAUUAAUGCAUUU |
| STMN2_ | + | CTTT | 2066 | TATATGAGTGTAAAG | 4072 | UAUAUGAGUGUAAAGG |
| intron1 | | | | GTTAATTAATGCATT | | UUAAUUAAUGCAUU |
| STMN2_ | + | GTT | 2067 | TCACAAAACACTTTTA | 4073 | UCACAAAACACUUUUA |
| intron1 | | C | | TATGAGTGTAAAGG | | UAUGAGUGUAAAGG |
| STMN2_ | + | TTT | 2068 | TTCTCACAAAACACTT | 4074 | UUCUCACAAAACACUU |
| intron1 | | G | | TTATATGAGTGTAA | | UUAUAUGAGUGUAA |
| STMN2_ | + | ATT | 2069 | GTTCTCACAAAACACT | 4075 | GUUCUCACAAAACACU |
| intron1 | | T | | TTTATATGAGTGTA | | UUUAUAUGAGUGUA |
| STMN2_ | + | TTT | 2070 | TGTACATTTGTTCTCA | 4076 | UGUACAUUUGUUCUCA |
| intron1 | | G | | CAAAACACTTTTAT | | CAAAACACUUUUAU |
| STMN2_ | + | ATT | 2071 | GTGTACATTTGTTCTC | 4077 | GUGUACAUUUGUUCUC |
| intron1 | | T | | ACAAAACACTTTTA | | ACAAAACACUUUUA |
| STMN2_ | + | ATT | 2072 | AAGATAACATTTGTGT | 4078 | AAGAUAACAUUUGUGU |
| intron1 | | A | | ACATTTGTTCTCAC | | ACAUUUGUUCUCAC |
| STMN2_ | + | ATT | 2073 | GTCATGATTAAAGAT | 4079 | GUCAUGAUUAAAGAUA |
| intron1 | | A | | AACATTTGTGTACAT | | ACAUUUGUGUACAU |
| STMN2_ | + | TTT | 2074 | TTAGTCATGATTAAAG | 4080 | UUAGUCAUGAUUAAAG |
| intron1 | | A | | ATAACATTTGTGTA | | AUAACAUUUGUGUA |
| STMN2_ | + | TTTT | 2075 | ATTAGTCATGATTAAA | 4081 | AUUAGUCAUGAUUAAA |
| intron1 | | | | GATAACATTTGTGT | | GAUAACAUUUGUGU |
| STMN2_ | + | TTTT | 2076 | TATTAGTCATGATTAA | 4082 | UAUUAGUCAUGAUUAA |
| intron1 | | | | AGATAACATTTGTG | | AGAUAACAUUUGUG |
| STMN2_ | + | ATT | 2077 | TTATTAGTCATGATTA | 4083 | UUAUUAGUCAUGAUUA |
| intron1 | | T | | AAGATAACATTTGT | | AAGAUAACAUUUGU |
| STMN2_ | + | TTT | 2078 | TAATATCCATTTTTAT | 4084 | UAAUAUCCAUUUUUAU |
| intron1 | | A | | TAGTCATGATTAAA | | UAGUCAUGAUUAAA |
| STMN2_ | + | GTT | 2079 | ATAATATCCATTTTTA | 4085 | AUAAUAUCCAUUUUUA |
| intron1 | | T | | TTAGTCATGATTAA | | UUAGUCAUGAUUAA |
| STMN2_ | + | CTT | 2080 | TGTTTATAATATCCAT | 4086 | UGUUUAUAAUAUCCAU |
| intron1 | | G | | TTTTATTAGTCATG | | UUUUAUUAGUCAUG |
| STMN2_ | + | TTT | 2081 | CAGTAGTAAAGCTTGT | 4087 | CAGUAGUAAAGCUUGU |
| intron1 | | G | | GTTTATAATATCCA | | GUUUAUAAUAUCCA |
| STMN2_ | + | ATT | 2082 | GCAGTAGTAAAGCTT | 4088 | GCAGUAGUAAAGCUUG |
| intron1 | | T | | GTGTTTATAATATCC | | UGUUUAUAAUAUCC |
| STMN2_ | + | TTT | 2083 | TCAAGGAGACATTTG | 4089 | UCAAGGAGACAUUUGC |
| intron1 | | G | | CAGTAGTAAAGCTTG | | AGUAGUAAAGCUUG |
| STMN2_ | + | ATT | 2084 | GTCAAGGAGACATTT | 4090 | GUCAAGGAGACAUUUG |
| intron1 | | T | | GCAGTAGTAAAGCTT | | CAGUAGUAAAGCUU |
| STMN2_ | + | TTT | 2085 | ATAAAGGAATCAGGC | 4091 | AUAAAGGAAUCAGGCC |
| intron1 | | A | | CCTGTCATTTGTCAA | | CUGUCAUUUGUCAA |
| STMN2_ | + | TTTT | 2086 | AATAAAGGAATCAGG | 4092 | AAUAAAGGAAUCAGGC |
| intron1 | | | | CCCTGTCATTTGTCA | | CCUGUCAUUUGUCA |
| STMN2_ | + | ATT | 2087 | TGCTGGTCATGTGGAA | 4093 | UGCUGGUCAUGUGGAA |
| intron1 | | T | | ATATAGCTTCTTTA | | AUAUAGCUUCUUUA |
| STMN2_ | + | TTTT | 2088 | GCTGGTCATGTGGAA | 4094 | GCUGGUCAUGUGGAAA |
| intron1 | | | | ATATAGCTTCTTTAG | | UAUAGCUUCUUUAG |
| STMN2_ | + | TTT | 2089 | CTGGTCATGTGGAAAT | 4095 | CUGGUCAUGUGGAAAU |
| intron1 | | G | | ATAGCTTCTTTAGG | | AUAGCUUCUUUAGG |
| STMN2_ | + | CTT | 2090 | TTTAGGAATTGTACTT | 4096 | UUUAGGAAUUGUACUU |
| intron1 | | C | | AGAGTAGGAGCCAC | | AGAGUAGGAGCCAC |
| STMN2_ | + | TTT | 2091 | AAATAATTTATTTTTA | 4097 | AAAUAAUUUAUUUUUA |
| intron1 | | A | | TAGGGCAAAAATAT | | UAGGGCAAAAAUAU |
| STMN2_ | + | ATT | 2092 | AAAATAATTTATTTTT | 4098 | AAAAUAAUUUAUUUUU |
| intron1 | | T | | ATAGGGCAAAAATA | | AUAGGGCAAAAAUA |
| STMN2_ | + | GTT | 2093 | TCATAGAGCACATTTA | 4099 | UCAUAGAGCACAUUUA |
| intron1 | | C | | AAATAATTTATTTT | | AAAUAAUUUAUUUU |
| STMN2_ | + | ATT | 2094 | CAGTTCTCATAGAGCA | 4100 | CAGUUCUCAUAGAGCA |
| intron1 | | A | | CATTTAAAATAATT | | CAUUUAAAAUAAUU |
| STMN2_ | + | TTT | 2095 | TGGCAAGAAATAGAT | 4101 | UGGCAAGAAAUAGAUA |
| intron1 | | A | | AATTACAGTTCTCAT | | AUUACAGUUCUCAU |
| STMN2_ | + | TTTT | 2096 | ATGGCAAGAAATAGA | 4102 | AUGGCAAGAAAUAGAU |
| intron1 | | | | TAATTACAGTTCTCA | | AAUUACAGUUCUCA |
| STMN2_ | + | ATT | 2097 | TATGGCAAGAAATAG | 4103 | UAUGGCAAGAAAUAGA |
| intron1 | | T | | ATAATTACAGTTCTC | | UAAUUACAGUUCUC |
| STMN2_ | + | TTT | 2098 | TTTTATGGCAAGAAAT | 4104 | UUUUAUGGCAAGAAAU |
| intron1 | | A | | AGATAATTACAGTT | | AGAUAAUUACAGUU |
| STMN2_ | + | ATT | 2099 | ATTTTATGGCAAGAA | 4105 | AUUUUAUGGCAAGAAA |
| intron1 | | T | | ATAGATAATTACAGT | | UAGAUAAUUACAGU |
| STMN2_ | + | TTTC | 2100 | AAAATTTATTTTATGG | 4106 | AAAAUUUAUUUUAUGG |
| intron1 | | | | CAAGAAATAGATAA | | CAAGAAAUAGAUAA |
| STMN2_ | + | GTT | 2101 | CAAAATTTATTTTATG | 4107 | CAAAAUUUAUUUUAUG |
| intron1 | | T | | GCAAGAAATAGATA | | GCAAGAAAUAGAUA |
| STMN2_ | + | GTT | 2102 | TGGGTTTCAAAATTTA | 4108 | UGGGUUUCAAAAUUUA |
| intron1 | | A | | TTTTATGGCAAGAA | | UUUUAUGGCAAGAA |
| STMN2_ | + | TTT | 2103 | ATACTCTGGAAAGTTA | 4109 | AUACUCUGGAAAGUUA |
| intron1 | | A | | TGGGTTTCAAAATT | | UGGGUUUCAAAAUU |
| STMN2_ | + | CTT | 2104 | TGAAATGCAGCCATA | 4110 | UGAAAUGCAGCCAUAA |
| intron1 | | A | | AAGTTTAACTTCCAT | | AGUUUAACUUCCAU |
| STMN2_ | + | ATT | 2105 | AATACTCTGGAAAGTT | 4111 | AAUACUCUGGAAAGUU |
| intron1 | | T | | ATGGGTTTCAAAAT | | AUGGGUUUCAAAAU |
| STMN2_ | + | GTT | 2106 | TTGACCTCCAGAGTAA | 4112 | UUGACCUCCAGAGUAA |
| intron1 | | G | | AATATTTAATACTC | | AAUAUUUAAUACUC |
| STMN2_ | + | CTT | 2107 | TTGTTGACCTCCAGAG | 4113 | UUGUUGACCUCCAGAG |
| intron1 | | G | | TAAAATATTTAATA | | UAAAAUAUUUAAUA |
| STMN2_ | + | GTT | 2108 | TCACTTGTTGTTGACC | 4114 | UCACUUGUUGUUGACC |
| intron1 | | C | | TCCAGAGTAAAATA | | UCCAGAGUAAAAUA |
| STMN2_ | + | TTT | 2109 | TTCTCACTTGTTGTTG | 4115 | UUCUCACUUGUUGUUG |
| intron1 | | G | | ACCTCCAGAGTAAA | | ACCUCCAGAGUAAA |
| STMN2_ | + | GTT | 2110 | GTTCTCACTTGTTGTT | 4116 | GUUCUCACUUGUUGUU |
| intron1 | | T | | GACCTCCAGAGTAA | | GACCUCCAGAGUAA |
| STMN2_ | + | TTT | 2111 | AGTTTGTTCTCACTTG | 4117 | AGUUUGUUCUCACUUG |
| intron1 | | A | | TTGTTGACCTCCAG | | UUGUUGACCUCCAG |
| STMN2_ | + | TTTT | 2112 | AAGTTTGTTCTCACTT | 4118 | AAGUUUGUUCUCACUU |
| intron1 | | | | GTTGTTGACCTCCA | | GUUGUUGACCUCCA |
| STMN2_ | + | ATT | 2113 | TAAGTTTGTTCTCACT | 4119 | UAAGUUUGUUCUCACU |
| intron1 | | T | | TGTTGTTGACCTCC | | UGUUGUUGACCUCC |
| STMN2_ | + | ATT | 2114 | TACTATAAAACCATA | 4120 | UACUAUAAAACCAUAA |
| intron1 | | A | | ACAAAAATATTTTAA | | CAAAAAUAUUUUAA |
| STMN2_ | + | CTT | 2115 | GAGTAGGAGCCACAT | 4121 | GAGUAGGAGCCACAUA |
| intron1 | | A | | ATTATACTATAAAAC | | UUAUACUAUAAAAC |
| STMN2_ | + | ATT | 2116 | TACTTAGAGTAGGAG | 4122 | UACUUAGAGUAGGAGC |
| intron1 | | G | | CCACATATTATACTA | | CACAUAUUAUACUA |
| STMN2_ | + | TTT | 2117 | GGAATTGTACTTAGA | 4123 | GGAAUUGUACUUAGAG |
| intron1 | | A | | GTAGGAGCCACATAT | | UAGGAGCCACAUAU |
| STMN2_ | + | CTTT | 2118 | AGGAATTGTACTTAG | 4124 | AGGAAUUGUACUUAGA |
| intron1 | | | | AGTAGGAGCCACATA | | GUAGGAGCCACAUA |
| STMN2_ | + | GTT | 2119 | ACCTCCAGAGTAAAA | 4125 | ACCUCCAGAGUAAAAU |
| intron1 | | G | | TATTTAATACTCTGG | | AUUUAAUACUCUGG |
| STMN2_ | + | GTT | 2120 | AACTTCCATTAACAAA | 4126 | AACUUCCAUUAACAAA |
| intron1 | | T | | GCTGCTCACAGTAA | | GCUGCUCACAGUAA |
| STMN2_ | + | TTT | 2121 | ACTTCCATTAACAAAG | 4127 | ACUUCCAUUAACAAAG |
| intron1 | | A | | CTGCTCACAGTAAA | | CUGCUCACAGUAAA |
| STMN2_ | + | CTT | 2122 | CATTAACAAAGCTGCT | 4128 | CAUUAACAAAGCUGCU |
| intron1 | | C | | CACAGTAAACCTAT | | CACAGUAAACCUAU |
| STMN2_ | + | ATT | 2123 | AAAGATTGGTAAATTT | 4129 | AAAGAUUGGUAAAUUU |
| intron1 | | T | | AAGCTCAAATAATT | | AAGCUCAAAUAAUU |
| STMN2_ | + | CTT | 2124 | TTTAAAGATTGGTAAA | 4130 | UUUAAAGAUUGGUAAA |
| intron1 | | A | | TTTAAGCTCAAATA | | UUUAAGCUCAAAUA |
| STMN2_ | + | GTT | 2125 | TCTTATTTAAAGATTG | 4131 | UCUUAUUUAAAGAUUG |
| intron1 | | G | | GTAAATTTAAGCTC | | GUAAAUUUAAGCUC |
| STMN2_ | + | CTT | 2126 | ATATAATCCCTCTGAG | 4132 | AUAUAAUCCCUCUGAG |
| intron1 | | C | | ATGGGCATACTATA | | AUGGGCAUACUAUA |
| STMN2_ | + | TTT | 2127 | AATCTTCATATAATCC | 4133 | AAUCUUCAUAUAAUCC |
| intron1 | | G | | CTCTGAGATGGGCA | | CUCUGAGAUGGGCA |
| STMN2_ | + | TTTT | 2128 | GAATCTTCATATAATC | 4134 | GAAUCUUCAUAUAAUC |
| intron1 | | | | CCTCTGAGATGGGC | | CCUCUGAGAUGGGC |
| STMN2_ | + | CTTT | 2129 | TGAATCTTCATATAAT | 4135 | UGAAUCUUCAUAUAAU |
| intron1 | | | | CCCTCTGAGATGGG | | CCCUCUGAGAUGGG |
| STMN2_ | + | CTT | 2130 | ATCCTTTTGAATCTTC | 4136 | AUCCUUUUGAAUCUUC |
| intron1 | | C | | ATATAATCCCTCTG | | AUAUAAUCCCUCUG |
| STMN2_ | + | ATT | 2131 | ACCTGCTTCATCCTTT | 4137 | ACCUGCUUCAUCCUUU |
| intron1 | | C | | TGAATCTTCATATA | | UGAAUCUUCAUAUA |
| STMN2_ | + | TTT | 2132 | GAAAACATTCACCTGC | 4138 | GAAAACAUUCACCUGC |
| intron1 | | A | | TTCATCCTTTTGAA | | UUCAUCCUUUUGAA |
| STMN2_ | + | TTTT | 2133 | AGAAAACATTCACCT | 4139 | AGAAAACAUUCACCUG |
| intron1 | | | | GCTTCATCCTTTTGA | | CUUCAUCCUUUUGA |
| STMN2_ | + | TTTT | 2134 | TAGAAAACATTCACCT | 4140 | UAGAAAACAUUCACCU |
| intron1 | | | | GCTTCATCCTTTTG | | GCUUCAUCCUUUUG |
| STMN2_ | + | ATT | 2135 | TTAGAAAACATTCACC | 4141 | UUAGAAAACAUUCACC |
| intron1 | | T | | TGCTTCATCCTTTT | | UGCUUCAUCCUUUU |
| STMN2_ | + | CTT | 2136 | TCATTTTTAGAAAACA | 4142 | UCAUUUUUAGAAAACA |
| intron1 | | G | | TTCACCTGCTTCAT | | UUCACCUGCUUCAU |
| STMN2_ | + | ATT | 2137 | AATCGCATGATCTATC | 4143 | AAUCGCAUGAUCUAUC |
| intron1 | | A | | TATATGGGACCTTG | | UAUAUGGGACCUUG |
| STMN2_ | + | GTT | 2138 | AAAAGAAAAATTAAA | 4144 | AAAAGAAAAAUUAAAU |
| intron1 | | C | | TCGCATGATCTATCT | | CGCAUGAUCUAUCU |
| STMN2_ | + | TTT | 2139 | AAAGGAGCAGGCAAG | 4145 | AAAGGAGCAGGCAAGC |
| intron1 | | A | | CATAGAAGACTAAAA | | AUAGAAGACUAAAA |
| STMN2_ | + | TTTT | 2140 | AAAAGGAGCAGGCAA | 4146 | AAAAGGAGCAGGCAAG |
| intron1 | | | | GCATAGAAGACTAAA | | CAUAGAAGACUAAA |
| STMN2_ | + | TTTT | 2141 | TAAAAGGAGCAGGCA | 4147 | UAAAAGGAGCAGGCAA |
| intron1 | | | | AGCATAGAAGACTAA | | GCAUAGAAGACUAA |
| STMN2_ | + | TTTT | 2142 | TTAAAAGGAGCAGGC | 4148 | UUAAAAGGAGCAGGCA |
| intron1 | | | | AAGCATAGAAGACTA | | AGCAUAGAAGACUA |
| STMN2_ | + | GTT | 2143 | TTTAAAAGGAGCAGG | 4149 | UUUAAAAGGAGCAGGC |
| intron1 | | T | | CAAGCATAGAAGACT | | AAGCAUAGAAGACU |
| STMN2_ | + | CTT | 2144 | TATAGTTTTTTAAAAG | 4150 | UAUAGUUUUUUAAAAG |
| intron1 | | A | | GAGCAGGCAAGCAT | | GAGCAGGCAAGCAU |
| STMN2_ | + | TTTC | 2145 | TTATATAGTTTTTTAA | 4151 | UUAUAUAGUUUUUUAA |
| intron1 | | | | AAGGAGCAGGCAAG | | AAGGAGCAGGCAAG |
| STMN2_ | + | TTTT | 2146 | CTTATATAGTTTTTTA | 4152 | CUUAUAUAGUUUUUUA |
| intron1 | | | | AAAGGAGCAGGCAA | | AAAGGAGCAGGCAA |
| STMN2_ | + | TTTT | 2147 | TCTTATATAGTTTTTT | 4153 | UCUUAUAUAGUUUUUU |
| intron1 | | | | AAAAGGAGCAGGCA | | AAAAGGAGCAGGCA |
| STMN2_ | + | TTTT | 2148 | TTCTTATATAGTTTTTT | 4154 | UUCUUAUAUAGUUUUU |
| intron1 | | | | AAAAGGAGCAGGC | | UAAAAGGAGCAGGC |
| STMN2_ | + | TTTT | 2149 | TTTCTTATATAGTTTTT | 4155 | UUUCUUAUAUAGUUUU |
| intron1 | | | | TAAAAGGAGCAGG | | UUAAAAGGAGCAGG |
| STMN2_ | + | TTT | 2150 | AAGATTGGTAAATTTA | 4156 | AAGAUUGGUAAAUUUA |
| intron1 | | A | | AGCTCAAATAATTT | | AGCUCAAAUAAUUU |
| STMN2_ | + | ATT | 2151 | GTAAATTTAAGCTCAA | 4157 | GUAAAUUUAAGCUCAA |
| intron1 | | G | | ATAATTTATTCAGT | | AUAAUUUAUUCAGU |
| STMN2_ | + | ATT | 2152 | AAGCTCAAATAATTTA | 4158 | AAGCUCAAAUAAUUUA |
| intron1 | | T | | TTCAGTGGCAAGCC | | UUCAGUGGCAAGCC |
| STMN2_ | + | TTT | 2153 | AGCTCAAATAATTTAT | 4159 | AGCUCAAAUAAUUUAU |
| intron1 | | A | | TCAGTGGCAAGCCT | | UCAGUGGCAAGCCU |
| STMN2_ | + | TTT | 2154 | TTCTGAAGCCTGTGCC | 4160 | UUCUGAAGCCUGUGCC |
| intron1 | | G | | AGGTATTATGAGAA | | AGGUAUUAUGAGAA |
| STMN2_ | + | TTTT | 2155 | GATTACATTTTATGTA | 4161 | GAUUACAUUUUAUGUA |
| intron1 | | | | ATTCTAATCCAGCT | | AUUCUAAUCCAGCU |
| STMN2_ | + | CTTT | 2156 | GTTCTGAAGCCTGTGC | 4162 | GUUCUGAAGCCUGUGC |
| intron1 | | | | CAGGTATTATGAGA | | CAGGUAUUAUGAGA |
| STMN2_ | + | ATT | 2157 | GAGCACCAACTTTGTT | 4163 | GAGCACCAACUUUGUU |
| intron1 | | G | | CTGAAGCCTGTGCC | | CUGAAGCCUGUGCC |
| STMN2_ | + | ATT | 2158 | ATAGTCAGTGTCACTA | 4164 | AUAGUCAGUGUCACUA |
| intron1 | | G | | ACTAAAGTAAAATA | | ACUAAAGUAAAAUA |
| STMN2_ | + | TTT | 2159 | AAGTCATTGATAGTCA | 4165 | AAGUCAUUGAUAGUCA |
| intron1 | | A | | GTGTCACTAACTAA | | GUGUCACUAACUAA |
| STMN2_ | + | GTT | 2160 | AAAGTCATTGATAGTC | 4166 | AAAGUCAUUGAUAGUC |
| intron1 | | T | | AGTGTCACTAACTA | | AGUGUCACUAACUA |
| STMN2_ | + | CTT | 2161 | AGTTTAAAGTCATTGA | 4167 | AGUUUAAAGUCAUUGA |
| intron1 | | C | | TAGTCAGTGTCACT | | UAGUCAGUGUCACU |
| STMN2_ | + | TTT | 2162 | TCTTCAGTTTAAAGTC | 4168 | UCUUCAGUUUAAAGUC |
| intron1 | | G | | ATTGATAGTCAGTG | | AUUGAUAGUCAGUG |
| STMN2_ | + | ATT | 2163 | GTCTTCAGTTTAAAGT | 4169 | GUCUUCAGUUUAAAGU |
| intron1 | | T | | CATTGATAGTCAGT | | CAUUGAUAGUCAGU |
| STMN2_ | + | TTT | 2164 | GCACTCCCTCCACTGT | 4170 | GCACUCCCUCCACUGU |
| intron1 | | A | | CCTGTAATAAAACA | | CCUGUAAUAAAACA |
| STMN2_ | + | GTT | 2165 | AGCACTCCCTCCACTG | 4171 | AGCACUCCCUCCACUG |
| intron1 | | T | | TCCTGTAATAAAAC | | UCCUGUAAUAAAAC |
| STMN2_ | + | ATT | 2166 | ATGCAAAATAAGGTT | 4172 | AUGCAAAAUAAGGUUU |
| intron1 | | C | | TAGCACTCCCTCCAC | | AGCACUCCCUCCAC |
| STMN2_ | + | ATT | 2167 | TTTTCTTATATAGTTTT | 4173 | UUUUCUUAUAUAGUUU |
| intron1 | | T | | TTAAAAGGAGCAG | | UUUAAAAGGAGCAG |
| STMN2_ | + | TTTC | 2168 | ATACATATATACACAT | 4174 | AUACAUAUAUACACAU |
| intron1 | | | | TCATGCAAAATAAG | | UCAUGCAAAAUAAG |
| STMN2_ | + | GTT | 2169 | TATATCATGTATGTGC | 4175 | UAUAUCAUGUAUGUGC |
| intron1 | | A | | CTATTTCATACATA | | CUAUUUCAUACAUA |
| STMN2_ | + | TTT | 2170 | TATGTAATATATAAAT | 4176 | UAUGUAAUAUAUAAAU |
| intron1 | | A | | ATGTTATATATCAT | | AUGUUAUAUAUCAU |
| STMN2_ | + | ATT | 2171 | ATATGTAATATATAAA | 4177 | AUAUGUAAUAUAUAAA |
| intron1 | | T | | TATGTTATATATCA | | UAUGUUAUAUAUCA |
| STMN2_ | + | TTT | 2172 | CCTATCAAAATATTTA | 4178 | CCUAUCAAAAUAUUUA |
| intron1 | | A | | TATGTAATATATAA | | UAUGUAAUAUAUAA |
| STMN2_ | + | ATT | 2173 | ACCTATCAAAATATTT | 4179 | ACCUAUCAAAAUAUUU |
| intron1 | | T | | ATATGTAATATATA | | AUAUGUAAUAUAUA |
| STMN2_ | + | ATT | 2174 | TTTACCTATCAAAATA | 4180 | UUUACCUAUCAAAAUA |
| intron1 | | A | | TTTATATGTAATAT | | UUUAUAUGUAAUAU |
| STMN2_ | + | GTT | 2175 | TGTATATTATTTACCT | 4181 | UGUAUAUUAUUUACCU |
| intron1 | | G | | ATCAAAATATTTAT | | AUCAAAAUAUUUAU |
| STMN2_ | + | ATT | 2176 | CATATAATAAAGTTGT | 4182 | CAUAUAAUAAAGUUGU |
| intron1 | | A | | GTATATTATTTACC | | GUAUAUUAUUUACC |
| STMN2_ | + | ATT | 2177 | TAACATATAATATATA | 4183 | UAACAUAUAAUAUAUA |
| intron1 | | A | | TATTACATATAATA | | UAUUACAUAUAAUA |
| STMN2_ | + | ATT | 2178 | TATATATATTATAACA | 4184 | UAUAUAUAUUAUAACA |
| intron1 | | A | | TATAATATATATAT | | UAUAAUAUAUAUAU |
| STMN2_ | + | ATT | 2179 | AGTGGCAAGCCTCAG | 4185 | AGUGGCAAGCCUCAGA |
| intron1 | | C | | AGGCAGACTCGGAAC | | GGCAGACUCGGAAC |
| STMN2_ | + | TTT | 2180 | TTCAGTGGCAAGCCTC | 4186 | UUCAGUGGCAAGCCUC |
| intron1 | | A | | AGAGGCAGACTCGG | | AGAGGCAGACUCGG |
| STMN2_ | + | ATT | 2181 | ATTCAGTGGCAAGCCT | 4187 | AUUCAGUGGCAAGCCU |
| intron1 | | T | | CAGAGGCAGACTCG | | CAGAGGCAGACUCG |
| STMN2_ | + | ATT | 2182 | CATACATATATACACA | 4188 | CAUACAUAUAUACACA |
| intron1 | | T | | TTCATGCAAAATAA | | UUCAUGCAAAAUAA |
| STMN2_ | + | CTTT | 2183 | TAATAAAGGAATCAG | 4189 | UAAUAAAGGAAUCAGG |
| intron1 | | | | GCCCTGTCATTTGTC | | CCCUGUCAUUUGUC |
| STMN2_ | + | TTTC | 2184 | TGATGATTTTTTTCTT | 4190 | UGAUGAUUUUUUUCUU |
| intron1 | | | | ATATAGTTTTTTAA | | AUAUAGUUUUUUAA |
| STMN2_ | + | ATT | 2185 | TATTTCTGATGATTTT | 4191 | UAUUUCUGAUGAUUUU |
| intron1 | | A | | TTTCTTATATAGTT | | UUUCUUAUAUAGUU |
| STMN2_ | + | CTTT | 2186 | TTATTTCCAACAAAAA | 4192 | UUAUUUCCAACAAAAA |
| intron1 | | | | TATCTATTGTTATT | | UAUCUAUUGUUAUU |
| STMN2_ | + | GTT | 2187 | CTTTTTATTTCCAACA | 4193 | CUUUUUAUUUCCAACA |
| intron1 | | A | | AAAATATCTATTGT | | AAAAUAUCUAUUGU |
| STMN2_ | + | ATT | 2188 | ATGCAGAGTTACTTTT | 4194 | AUGCAGAGUUACUUUU |
| intron1 | | A | | TATTTCCAACAAAA | | UAUUUCCAACAAAA |
| STMN2_ | + | TTT | 2189 | TTAATGCAGAGTTACT | 4195 | UUAAUGCAGAGUUACU |
| intron1 | | A | | TTTTATTTCCAACA | | UUUUAUUUCCAACA |
| STMN2_ | + | TTTT | 2190 | ATTAATGCAGAGTTAC | 4196 | AUUAAUGCAGAGUUAC |
| intron1 | | | | TTTTTATTTCCAAC | | UUUUUAUUUCCAAC |
| STMN2_ | + | TTTT | 2191 | TATTAATGCAGAGTTA | 4197 | UAUUAAUGCAGAGUUA |
| intron1 | | | | CTTTTTATTTCCAA | | CUUUUUAUUUCCAA |
| STMN2_ | + | ATT | 2192 | TTATTAATGCAGAGTT | 4198 | UUAUUAAUGCAGAGUU |
| intron1 | | T | | ACTTTTTATTTCCA | | ACUUUUUAUUUCCA |
| STMN2_ | + | ATT | 2193 | TTTTTATTAATGCAGA | 4199 | UUUUUAUUAAUGCAGA |
| intron1 | | A | | GTTACTTTTTATTT | | GUUACUUUUUAUUU |
| STMN2_ | + | CTT | 2194 | AGAACATAATTATTTT | 4200 | AGAACAUAAUUAUUUU |
| intron1 | | C | | TATTAATGCAGAGT | | UAUUAAUGCAGAGU |
| STMN2_ | + | ATT | 2195 | CAGCCTCCCTGGGAAC | 4201 | CAGCCUCCCUGGGAAC |
| intron1 | | G | | TCTGCTTCAGAACA | | UCUGCUUCAGAACA |
| STMN2_ | + | CTT | 2196 | TTGCAGCCTCCCTGGG | 4202 | UUGCAGCCUCCCUGGG |
| intron1 | | A | | AACTCTGCTTCAGA | | AACUCUGCUUCAGA |
| STMN2_ | + | TTT | 2197 | GGATAGACTTATTGCA | 4203 | GGAUAGACUUAUUGCA |
| intron1 | | A | | GCCTCCCTGGGAAC | | GCCUCCCUGGGAAC |
| STMN2_ | + | TTTT | 2198 | AGGATAGACTTATTGC | 4204 | AGGAUAGACUUAUUGC |
| intron1 | | | | AGCCTCCCTGGGAA | | AGCCUCCCUGGGAA |
| STMN2_ | + | CTTT | 2199 | TAGGATAGACTTATTG | 4205 | UAGGAUAGACUUAUUG |
| intron1 | | | | CAGCCTCCCTGGGA | | CAGCCUCCCUGGGA |
| STMN2_ | + | ATT | 2200 | ATCATCTCAGGCACTT | 4206 | AUCAUCUCAGGCACUU |
| intron1 | | A | | TTAGGATAGACTTA | | UUAGGAUAGACUUA |
| STMN2_ | + | ATT | 2201 | CCAGACTCTCGGGAA | 4207 | CCAGACUCUCGGGAAG |
| intron1 | | T | | GAACATTAATCATCT | | AACAUUAAUCAUCU |
| STMN2_ | + | GTT | 2202 | TCATTTCCAGACTCTC | 4208 | UCAUUUCCAGACUCUC |
| intron1 | | A | | GGGAAGAACATTAA | | GGGAAGAACAUUAA |
| STMN2_ | + | GTT | 2203 | CAAAACTGAGACCAG | 4209 | CAAAACUGAGACCAGA |
| intron1 | | A | | AAAATCCCATCAAGA | | AAAUCCCAUCAAGA |
| STMN2_ | + | ATT | 2204 | ACTGTTACAAAACTG | 4210 | ACUGUUACAAAACUGA |
| intron1 | | G | | AGACCAGAAAATCCC | | GACCAGAAAAUCCC |
| STMN2_ | + | CTT | 2205 | TAATATATTGACTGTT | 4211 | UAAUAUAUUGACUGUU |
| intron1 | | A | | ACAAAACTGAGACC | | ACAAAACUGAGACC |
| STMN2_ | + | CTT | 2206 | CTAGTGAGGAGCAAC | 4212 | CUAGUGAGGAGCAACC |
| intron1 | | C | | CTAACTCACACGAAA | | UAACUCACACGAAA |
| STMN2_ | + | TTT | 2207 | GGCTTCCTAGTGAGG | 4213 | GGCUUCCUAGUGAGGA |
| intron1 | | G | | AGCAACCTAACTCAC | | GCAACCUAACUCAC |
| STMN2_ | + | GTT | 2208 | GGGCTTCCTAGTGAG | 4214 | GGGCUUCCUAGUGAGG |
| intron1 | | T | | GAGCAACCTAACTCA | | AGCAACCUAACUCA |
| STMN2_ | + | TTTC | 2209 | CCAGTTTGGGCTTCCT | 4215 | CCAGUUUGGGCUUCCU |
| intron1 | | | | AGTGAGGAGCAACC | | AGUGAGGAGCAACC |
| STMN2_ | + | GTT | 2210 | CCCAGTTTGGGCTTCC | 4216 | CCCAGUUUGGGCUUCC |
| intron1 | | T | | TAGTGAGGAGCAAC | | UAGUGAGGAGCAAC |
| STMN2_ | + | ATT | 2211 | TAATAATAGTTTCCCA | 4217 | UAAUAAUAGUUUCCCA |
| intron1 | | A | | GTTTGGGCTTCCTA | | GUUUGGGCUUCCUA |
| STMN2_ | + | ATT | 2212 | ACAAAGCTGCTCACA | 4218 | ACAAAGCUGCUCACAG |
| intron1 | | A | | GTAAACCTATTATAA | | UAAACCUAUUAUAA |
| STMN2_ | + | TTTT | 2213 | TATTTCCAACAAAAAT | 4219 | UAUUUCCAACAAAAAU |
| intron1 | | | | ATCTATTGTTATTA | | AUCUAUUGUUAUUA |
| STMN2_ | + | TTTT | 2214 | ATTTCCAACAAAAAT | 4220 | AUUUCCAACAAAAAUA |
| intron1 | | | | ATCTATTGTTATTAT | | UCUAUUGUUAUUAU |
| STMN2_ | + | TTT | 2215 | TTTCCAACAAAAATAT | 4221 | UUUCCAACAAAAAUAU |
| intron1 | | A | | CTATTGTTATTATT | | CUAUUGUUAUUAUU |
| STMN2_ | + | ATT | 2216 | CCAACAAAAATATCT | 4222 | CCAACAAAAAUAUCUA |
| intron1 | | T | | ATTGTTATTATTTAA | | UUGUUAUUAUUUAA |
| STMN2_ | + | TTT | 2217 | TTATATTTCTGATGAT | 4223 | UUAUAUUUCUGAUGAU |
| intron1 | | A | | TTTTTTCTTATATA | | UUUUUUCUUAUAUA |
| STMN2_ | + | TTTT | 2218 | ATTATATTTCTGATGA | 4224 | AUUAUAUUUCUGAUGA |
| intron1 | | | | TTTTTTTCTTATAT | | UUUUUUUCUUAUAU |
| STMN2_ | + | TTTT | 2219 | TATTATATTTCTGATG | 4225 | UAUUAUAUUUCUGAUG |
| intron1 | | | | ATTTTTTTCTTATA | | AUUUUUUUCUUAUA |
| STMN2_ | + | CTTT | 2220 | TTATTATATTTCTGAT | 4226 | UUAUUAUAUUUCUGAU |
| intron1 | | | | GATTTTTTTCTTAT | | GAUUUUUUUCUUAU |
| STMN2_ | + | ATT | 2221 | TCTTTTTATTATATTTC | 4227 | UCUUUUUAUUAUAUUU |
| intron1 | | A | | TGATGATTTTTTT | | CUGAUGAUUUUUUU |
| STMN2_ | + | TTT | 2222 | AAAATTATCTTTTTAT | 4228 | AAAAUUAUCUUUUUAU |
| intron1 | | A | | TATATTTCTGATGA | | UAUAUUUCUGAUGA |
| STMN2_ | + | CTTT | 2223 | AAAAATTATCTTTTTA | 4229 | AAAAAUUAUCUUUUUA |
| intron1 | | | | TTATATTTCTGATG | | UUAUAUUUCUGAUG |
| STMN2_ | + | CTT | 2224 | TCACTTTAAAAATTAT | 4230 | UCACUUUAAAAAUUAU |
| intron1 | | G | | CTTTTTATTATATT | | CUUUUUAUUAUAUU |
| STMN2_ | + | ATT | 2225 | CATGATCCTGCACTCT | 4231 | CAUGAUCCUGCACUCU |
| intron1 | | A | | TGTCACTTTAAAAA | | UGUCACUUUAAAAA |
| STMN2_ | + | TTT | 2226 | ATGACATATTACATGA | 4232 | AUGACAUAUUACAUGA |
| intron1 | | A | | TCCTGCACTCTTGT | | UCCUGCACUCUUGU |
| STMN2_ | + | TTTT | 2227 | AATGACATATTACATG | 4233 | AAUGACAUAUUACAUG |
| intron1 | | | | ATCCTGCACTCTTG | | AUCCUGCACUCUUG |
| STMN2_ | + | CTTT | 2228 | TAATGACATATTACAT | 4234 | UAAUGACAUAUUACAU |
| intron1 | | | | GATCCTGCACTCTT | | GAUCCUGCACUCUU |
| STMN2_ | + | GTT | 2229 | TAGTCTTTTAATGACA | 4235 | UAGUCUUUUAAUGACA |
| intron1 | | C | | TATTACATGATCCT | | UAUUACAUGAUCCU |
| STMN2_ | + | ATT | 2230 | CTGATGATTTTTTTCT | 4236 | CUGAUGAUUUUUUUCU |
| intron1 | | T | | TATATAGTTTTTTA | | UAUAUAGUUUUUUA |
| STMN2_ | + | GTT | 2231 | TTCTAGTCTTTTAATG | 4237 | UUCUAGUCUUUUAAUG |
| intron1 | | G | | ACATATTACATGAT | | ACAUAUUACAUGAU |
| STMN2_ | + | ATT | 2232 | AAACACATGAAAAAT | 4238 | AAACACAUGAAAAAUU |
| intron1 | | C | | TACCAAAGTTGTTCT | | ACCAAAGUUGUUCU |
| STMN2_ | + | CTT | 2233 | TCATAATAAATATTCA | 4239 | UCAUAAUAAAUAUUCA |
| intron1 | | C | | AACACATGAAAAAT | | AACACAUGAAAAAU |
| STMN2_ | + | ATT | 2234 | GCACCCTTCTCATAAT | 4240 | GCACCCUUCUCAUAAU |
| intron1 | | A | | AAATATTCAAACAC | | AAAUAUUCAAACAC |
| STMN2_ | + | ATT | 2235 | CAATTAGCACCCTTCT | 4241 | CAAUUAGCACCCUUCU |
| intron1 | | C | | CATAATAAATATTC | | CAUAAUAAAUAUUC |
| STMN2_ | + | TTT | 2236 | TCTGAGAAATTCCAAT | 4242 | UCUGAGAAAUUCCAAU |
| intron1 | | A | | TAGCACCCTTCTCA | | UAGCACCCUUCUCA |
| STMN2_ | + | CTTT | 2237 | ATCTGAGAAATTCCA | 4243 | AUCUGAGAAAUUCCAA |
| intron1 | | | | ATTAGCACCCTTCTC | | UUAGCACCCUUCUC |
| STMN2_ | + | CTT | 2238 | CAGCTTTATCTGAGAA | 4244 | CAGCUUUAUCUGAGAA |
| intron1 | | A | | ATTCCAATTAGCAC | | AUUCCAAUUAGCAC |
| STMN2_ | + | TTT | 2239 | AGTCTTACAGCTTTAT | 4245 | AGUCUUACAGCUUUAU |
| intron1 | | A | | CTGAGAAATTCCAA | | CUGAGAAAUUCCAA |
| STMN2_ | + | ATT | 2240 | AAGTCTTACAGCTTTA | 4246 | AAGUCUUACAGCUUUA |
| intron1 | | T | | TCTGAGAAATTCCA | | UCUGAGAAAUUCCA |
| STMN2_ | + | ATT | 2241 | TTTAAGTCTTACAGCT | 4247 | UUUAAGUCUUACAGCU |
| intron1 | | A | | TTATCTGAGAAATT | | UUAUCUGAGAAAUU |
| STMN2_ | + | GTT | 2242 | TTATTTAAGTCTTACA | 4248 | UUAUUUAAGUCUUACA |
| intron1 | | A | | GCTTTATCTGAGAA | | GCUUUAUCUGAGAA |
| STMN2_ | + | ATT | 2243 | TTATTATTTAAGTCTT | 4249 | UUAUUAUUUAAGUCUU |
| intron1 | | G | | ACAGCTTTATCTGA | | ACAGCUUUAUCUGA |
| STMN2_ | + | TTTC | 2244 | CAACAAAAATATCTA | 4250 | CAACAAAAAUAUCUAU |
| intron1 | | | | TTGTTATTATTTAAG | | UGUUAUUAUUUAAG |
| STMN2_ | + | ATT | 2245 | CCAAAGTTGTTCTAGT | 4251 | CCAAAGUUGUUCUAGU |
| intron1 | | A | | CTTTTAATGACATA | | CUUUUAAUGACAUA |
| STMN2_ | + | ATT | 2246 | TCTTTTAATAAAGGAA | 4252 | UCUUUUAAUAAAGGAA |
| intron1 | | A | | TCAGGCCCTGTCAT | | UCAGGCCCUGUCAU |
| STMN2_ | + | TTTC | 2247 | CAGACTCTCGGGAAG | 4253 | CAGACUCUCGGGAAGA |
| intron1 | | | | AACATTAATCATCTC | | ACAUUAAUCAUCUC |
| STMN2_ | + | TTTT | 2248 | AATTATCTTTTAATAA | 4254 | AAUUAUCUUUUAAUAA |
| intron1 | | | | AGGAATCAGGCCCT | | AGGAAUCAGGCCCU |
| STMN2_ | + | CTT | 2249 | ATTATTCAATTCTAAC | 4255 | AUUAUUCAAUUCUAAC |
| intron1 | | C | | TTTCTAAGGAAGTC | | UUUCUAAGGAAGUC |
| STMN2_ | + | CTT | 2250 | TCTAAGCCAATAAAG | 4256 | UCUAAGCCAAUAAAGG |
| intron1 | | A | | GATCTTCATTATTCA | | AUCUUCAUUAUUCA |
| STMN2_ | + | CTT | 2251 | TGCTTATCTAAGCCAA | 4257 | UGCUUAUCUAAGCCAA |
| intron1 | | C | | TAAAGGATCTTCAT | | UAAAGGAUCUUCAU |
| STMN2_ | + | TTTC | 2252 | TTCTGCTTATCTAAGC | 4258 | UUCUGCUUAUCUAAGC |
| intron1 | | | | CAATAAAGGATCTT | | CAAUAAAGGAUCUU |
| STMN2_ | + | TTTT | 2253 | CTTCTGCTTATCTAAG | 4259 | CUUCUGCUUAUCUAAG |
| intron1 | | | | CCAATAAAGGATCT | | CCAAUAAAGGAUCU |
| STMN2_ | + | GTT | 2254 | TCTTCTGCTTATCTAA | 4260 | UCUUCUGCUUAUCUAA |
| intron1 | | T | | GCCAATAAAGGATC | | GCCAAUAAAGGAUC |
| STMN2_ | + | TTT | 2255 | AAAAGAGTGTTTTCTT | 4261 | AAAAGAGUGUUUUCUU |
| intron1 | | G | | CTGCTTATCTAAGC | | CUGCUUAUCUAAGC |
| STMN2_ | + | ATT | 2256 | GAAAAGAGTGTTTTCT | 4262 | GAAAAGAGUGUUUUCU |
| intron1 | | T | | TCTGCTTATCTAAG | | UCUGCUUAUCUAAG |
| STMN2_ | + | ATT | 2257 | AGTATGACTGTATATT | 4263 | AGUAUGACUGUAUAUU |
| intron1 | | G | | TGAAAAGAGTGTTT | | UGAAAAGAGUGUUU |
| STMN2_ | + | TTT | 2258 | TTGAGTATGACTGTAT | 4264 | UUGAGUAUGACUGUAU |
| intron1 | | A | | ATTTGAAAAGAGTG | | AUUUGAAAAGAGUG |
| STMN2_ | + | ATT | 2259 | ATTGAGTATGACTGTA | 4265 | AUUGAGUAUGACUGUA |
| intron1 | | T | | TATTTGAAAAGAGT | | UAUUUGAAAAGAGU |
| STMN2_ | + | CTT | 2260 | AGAATTTATTGAGTAT | 4266 | AGAAUUUAUUGAGUAU |
| intron1 | | A | | GACTGTATATTTGA | | GACUGUAUAUUUGA |
| STMN2_ | + | ATT | 2261 | TTAAGAATTTATTGAG | 4267 | UUAAGAAUUUAUUGAG |
| intron1 | | C | | TATGACTGTATATT | | UAUGACUGUAUAUU |
| STMN2_ | + | CTT | 2262 | CTGAATACCATGTGA | 4268 | CUGAAUACCAUGUGAG |
| intron1 | | C | | GAAAATTCTTAAGAA | | AAAAUUCUUAAGAA |
| STMN2_ | + | TTTC | 2263 | TTCCTGAATACCATGT | 4269 | UUCCUGAAUACCAUGU |
| intron1 | | | | GAGAAAATTCTTAA | | GAGAAAAUUCUUAA |
| STMN2_ | + | ATT | 2264 | CTTCCTGAATACCATG | 4270 | CUUCCUGAAUACCAUG |
| intron1 | | T | | TGAGAAAATTCTTA | | UGAGAAAAUUCUUA |
| STMN2_ | + | ATT | 2265 | TAAGAGTATTTCTTCC | 4271 | UAAGAGUAUUUCUUCC |
| intron1 | | C | | TGAATACCATGTGA | | UGAAUACCAUGUGA |
| STMN2_ | + | ATT | 2266 | TTCTAAGAGTATTTCT | 4272 | UUCUAAGAGUAUUUCU |
| intron1 | | A | | TCCTGAATACCATG | | UCCUGAAUACCAUG |
| STMN2_ | + | TTT | 2267 | CCAAATTATTCTAAGA | 4273 | CCAAAUUAUUCUAAGA |
| intron1 | | A | | GTATTTCTTCCTGA | | GUAUUUCUUCCUGA |
| STMN2_ | + | ATT | 2268 | ACCAAATTATTCTAAG | 4274 | ACCAAAUUAUUCUAAG |
| intron1 | | T | | AGTATTTCTTCCTG | | AGUAUUUCUUCCUG |
| STMN2_ | + | ATT | 2269 | TTTACCAAATTATTCT | 4275 | UUUACCAAAUUAUUCU |
| intron1 | | A | | AAGAGTATTTCTTC | | AAGAGUAUUUCUUC |
| STMN2_ | + | TTT | 2270 | TTATTTACCAAATTAT | 4276 | UUAUUUACCAAAUUAU |
| intron1 | | A | | TCTAAGAGTATTTC | | UCUAAGAGUAUUUC |
| STMN2_ | + | ATT | 2271 | ATTATTTACCAAATTA | 4277 | AUUAUUUACCAAAUUA |
| intron1 | | T | | TTCTAAGAGTATTT | | UUCUAAGAGUAUUU |
| STMN2_ | + | CTT | 2272 | TATTTATTATTTACCA | 4278 | UAUUUAUUAUUUACCA |
| intron1 | | A | | AATTATTCTAAGAG | | AAUUAUUCUAAGAG |
| STMN2_ | + | ATT | 2273 | CTGTCTCAATATATCT | 4279 | CUGUCUCAAUAUAUCU |
| intron1 | | G | | TATATTTATTATTT | | UAUAUUUAUUAUUU |
| STMN2_ | + | ATT | 2274 | AAACAAAAGATTGCT | 4280 | AAACAAAAGAUUGCUG |
| intron1 | | A | | GTCTCAATATATCTT | | UCUCAAUAUAUCUU |
| STMN2_ | + | TTT | 2275 | TGAATAGCAATACTG | 4281 | UGAAUAGCAAUACUGA |
| intron1 | | A | | AAGAAATTAAAACAA | | AGAAAUUAAAACAA |
| STMN2_ | + | ATT | 2276 | TTCAATTCTAACTTTC | 4282 | UUCAAUUCUAACUUUC |
| intron1 | | A | | TAAGGAAGTCAACC | | UAAGGAAGUCAACC |
| STMN2_ | + | ATT | 2277 | AATTCTAACTTTCTAA | 4283 | AAUUCUAACUUUCUAA |
| intron1 | | C | | GGAAGTCAACCTAC | | GGAAGUCAACCUAC |
| STMN2_ | + | ATT | 2278 | TAACTTTCTAAGGAAG | 4284 | UAACUUUCUAAGGAAG |
| intron1 | | C | | TCAACCTACAGATC | | UCAACCUACAGAUC |
| STMN2_ | + | CTTT | 2279 | CTAAGGAAGTCAACC | 4285 | CUAAGGAAGUCAACCU |
| intron1 | | | | TACAGATCAGAAAGA | | ACAGAUCAGAAAGA |
| STMN2_ | + | TTT | 2280 | CAATTTCTTGTACATT | 4286 | CAAUUUCUUGUACAUU |
| intron1 | | G | | GAAGGAAAGGAAGA | | GAAGGAAAGGAAGA |
| STMN2_ | + | TTTT | 2281 | GCAATTTCTTGTACAT | 4287 | GCAAUUUCUUGUACAU |
| intron1 | | | | TGAAGGAAAGGAAG | | UGAAGGAAAGGAAG |
| STMN2_ | + | TTTT | 2282 | TGCAATTTCTTGTACA | 4288 | UGCAAUUUCUUGUACA |
| intron1 | | | | TTGAAGGAAAGGAA | | UUGAAGGAAAGGAA |
| STMN2_ | + | ATT | 2283 | TTGCAATTTCTTGTAC | 4289 | UUGCAAUUUCUUGUAC |
| intron1 | | T | | ATTGAAGGAAAGGA | | AUUGAAGGAAAGGA |
| STMN2_ | + | TTTC | 2284 | CATTTTTGCAATTTCT | 4290 | CAUUUUUGCAAUUUCU |
| intron1 | | | | TGTACATTGAAGGA | | UGUACAUUGAAGGA |
| STMN2_ | + | CTTT | 2285 | CCATTTTTGCAATTTC | 4291 | CCAUUUUUGCAAUUUC |
| intron1 | | | | TTGTACATTGAAGG | | UUGUACAUUGAAGG |
| STMN2_ | + | TTTC | 2286 | AGGGTCTCTCAGAAG | 4292 | AGGGUCUCUCAGAAGC |
| intron1 | | | | CTGGGAAACTTTCCA | | UGGGAAACUUUCCA |
| STMN2_ | + | ATT | 2287 | CAGGGTCTCTCAGAA | 4293 | CAGGGUCUCUCAGAAG |
| intron1 | | T | | GCTGGGAAACTTTCC | | CUGGGAAACUUUCC |
| STMN2_ | + | GTT | 2288 | ATTTCAGGGTCTCTCA | 4294 | AUUUCAGGGUCUCUCA |
| intron1 | | C | | GAAGCTGGGAAACT | | GAAGCUGGGAAACU |
| STMN2_ | + | GTT | 2289 | ACAGTTCATTTCAGGG | 4295 | ACAGUUCAUUUCAGGG |
| intron1 | | A | | TCTCTCAGAAGCTG | | UCUCUCAGAAGCUG |
| STMN2_ | + | GTT | 2290 | TTAACAGTTCATTTCA | 4296 | UUAACAGUUCAUUUCA |
| intron1 | | G | | GGGTCTCTCAGAAG | | GGGUCUCUCAGAAG |
| STMN2_ | + | GTT | 2291 | TTGTTAACAGTTCATT | 4297 | UUGUUAACAGUUCAUU |
| intron1 | | G | | TCAGGGTCTCTCAG | | UCAGGGUCUCUCAG |
| STMN2_ | + | ATT | 2292 | AGTTGTTGTTAACAGT | 4298 | AGUUGUUGUUAACAGU |
| intron1 | | C | | TCATTTCAGGGTCT | | UCAUUUCAGGGUCU |
| STMN2_ | + | ATT | 2293 | ATGAATAGCAATACT | 4299 | AUGAAUAGCAAUACUG |
| intron1 | | T | | GAAGAAATTAAAACA | | AAGAAAUUAAAACA |
| STMN2_ | + | GTT | 2294 | GCCATTCAGTTGTTGT | 4300 | GCCAUUCAGUUGUUGU |
| intron1 | | A | | TAACAGTTCATTTC | | UAACAGUUCAUUUC |
| STMN2_ | + | GTT | 2295 | CTCAACACAAAGTTG | 4301 | CUCAACACAAAGUUGG |
| intron1 | | A | | GACTAAGTCTCAAAG | | ACUAAGUCUCAAAG |
| STMN2_ | + | TTT | 2296 | CAGAATATACTGTTAC | 4302 | CAGAAUAUACUGUUAC |
| intron1 | | G | | TCAACACAAAGTTG | | UCAACACAAAGUUG |
| STMN2_ | + | GTT | 2297 | GCAGAATATACTGTTA | 4303 | GCAGAAUAUACUGUUA |
| intron1 | | T | | CTCAACACAAAGTT | | CUCAACACAAAGUU |
| STMN2_ | + | CTT | 2298 | AGGGTTTGCAGAATA | 4304 | AGGGUUUGCAGAAUAU |
| intron1 | | C | | TACTGTTACTCAACA | | ACUGUUACUCAACA |
| STMN2_ | + | TTTC | 2299 | CCAAATAGGGCACTA | 4305 | CCAAAUAGGGCACUAA |
| intron1 | | | | AAAACATGATCCCAA | | AAACAUGAUCCCAA |
| STMN2_ | + | ATT | 2300 | CCCAAATAGGGCACT | 4306 | CCCAAAUAGGGCACUA |
| intron1 | | T | | AAAAACATGATCCCA | | AAAACAUGAUCCCA |
| STMN2_ | + | ATT | 2301 | AAAAATATAACATTTC | 4307 | AAAAAUAUAACAUUUC |
| intron1 | | A | | CCAAATAGGGCACT | | CCAAAUAGGGCACU |
| STMN2_ | + | ATT | 2302 | TGCTGCAAAAATGAT | 4308 | UGCUGCAAAAAUGAUA |
| intron1 | | A | | ACAATACACGAAATA | | CAAUACACGAAAUA |
| STMN2_ | + | TTTC | 2303 | TGGAAATATTATGCTG | 4309 | UGGAAAUAUUAUGCUG |
| intron1 | | | | CAAAAATGATACAA | | CAAAAAUGAUACAA |
| STMN2_ | + | CTTT | 2304 | CTGGAAATATTATGCT | 4310 | CUGGAAAUAUUAUGCU |
| intron1 | | | | GCAAAAATGATACA | | GCAAAAAUGAUACA |
| STMN2_ | + | ATT | 2305 | CCACCTTTCTGGAAAT | 4311 | CCACCUUUCUGGAAAU |
| intron1 | | A | | ATTATGCTGCAAAA | | AUUAUGCUGCAAAA |
| STMN2_ | + | CTT | 2306 | AAGGAATAGCATCAA | 4312 | AAGGAAUAGCAUCAAA |
| intron1 | | C | | AGACATAGTCAGGTC | | GACAUAGUCAGGUC |
| STMN2_ | + | TTTC | 2307 | TAAGGAAGTCAACCT | 4313 | UAAGGAAGUCAACCUA |
| intron1 | | | | ACAGATCAGAAAGAG | | CAGAUCAGAAAGAG |
| STMN2_ | + | GTT | 2308 | GACTAAGTCTCAAAG | 4314 | GACUAAGUCUCAAAGU |
| intron1 | | G | | TTAGCCATTCAGTTG | | UAGCCAUUCAGUUG |
| STMN2_ | + | ATT | 2309 | CTTGTACATTGAAGGA | 4315 | CUUGUACAUUGAAGGA |
| intron1 | | T | | AAGGAAGACACACT | | AAGGAAGACACACU |
| STMN2_ | + | CTT | 2310 | CTATCATTTATGAATA | 4316 | CUAUCAUUUAUGAAUA |
| intron1 | | A | | GCAATACTGAAGAA | | GCAAUACUGAAGAA |
| STMN2_ | + | CTT | 2311 | TGGCACAGTTGACAA | 4317 | UGGCACAGUUGACAAG |
| intron1 | | G | | GGATGATAAATCAAT | | GAUGAUAAAUCAAU |
| STMN2_ | + | TTTT | 2312 | AGGGATATTAACTTGT | 4318 | AGGGAUAUUAACUUGU |
| intron1 | | | | AATATACAGGTATC | | AAUAUACAGGUAUC |
| STMN2_ | + | GTT | 2313 | TAGGGATATTAACTTG | 4319 | UAGGGAUAUUAACUUG |
| intron1 | | T | | TAATATACAGGTAT | | UAAUAUACAGGUAU |
| STMN2_ | + | ATT | 2314 | TGACCACTAAACACAT | 4320 | UGACCACUAAACACAU |
| intron1 | | C | | CAGTTTTAGGGATA | | CAGUUUUAGGGAUA |
| STMN2_ | + | CTT | 2315 | CGAACAAGCTCCCAG | 4321 | CGAACAAGCUCCCAGA |
| intron1 | | C | | ATGATGCTGATTCTG | | UGAUGCUGAUUCUG |
| STMN2_ | + | ATT | 2316 | TGTCTTCCGAACAAGC | 4322 | UGUCUUCCGAACAAGC |
| intron1 | | C | | TCCCAGATGATGCT | | UCCCAGAUGAUGCU |
| STMN2_ | + | CTT | 2317 | AGGCAGACATTCTGTC | 4323 | AGGCAGACAUUCUGUC |
| intron1 | | G | | TTCCGAACAAGCTC | | UUCCGAACAAGCUC |
| STMN2_ | + | ATT | 2318 | AATACATCTGGCTTGA | 4324 | AAUACAUCUGGCUUGA |
| intron1 | | C | | GGCAGACATTCTGT | | GGCAGACAUUCUGU |
| STMN2_ | + | ATT | 2319 | TGATTCAATACATCTG | 4325 | UGAUUCAAUACAUCUG |
| intron1 | | C | | GCTTGAGGCAGACA | | GCUUGAGGCAGACA |
| STMN2_ | + | ATT | 2320 | AAATGCAAATTCTGAT | 4326 | AAAUGCAAAUUCUGAU |
| intron1 | | A | | TCAATACATCTGGC | | UCAAUACAUCUGGC |
| STMN2_ | + | TTTC | 2321 | ATTAAAATGCAAATTC | 4327 | AUUAAAAUGCAAAUUC |
| intron1 | | | | TGATTCAATACATC | | UGAUUCAAUACAUC |
| STMN2_ | + | TTTT | 2322 | CATTAAAATGCAAATT | 4328 | CAUUAAAAUGCAAAUU |
| intron1 | | | | CTGATTCAATACAT | | CUGAUUCAAUACAU |
| STMN2_ | + | ATT | 2323 | TCATTAAAATGCAAAT | 4329 | UCAUUAAAAUGCAAAU |
| intron1 | | T | | TCTGATTCAATACA | | UCUGAUUCAAUACA |
| STMN2_ | + | TTT | 2324 | ATTTTCATTAAAATGC | 4330 | AUUUUCAUUAAAAUGC |
| intron1 | | G | | AAATTCTGATTCAA | | AAAUUCUGAUUCAA |
| STMN2_ | + | CTTT | 2325 | GATTTTCATTAAAATG | 4331 | GAUUUUCAUUAAAAUG |
| intron1 | | | | CAAATTCTGATTCA | | CAAAUUCUGAUUCA |
| STMN2_ | + | ATT | 2326 | CCTTTGATTTTCATTA | 4332 | CCUUUGAUUUUCAUUA |
| intron1 | | A | | AAATGCAAATTCTG | | AAAUGCAAAUUCUG |
| STMN2_ | + | TTT | 2327 | ATGTGCATATGAATTA | 4333 | AUGUGCAUAUGAAUUA |
| intron1 | | G | | CCTTTGATTTTCAT | | CCUUUGAUUUUCAU |
| STMN2_ | + | CTTT | 2328 | GATGTGCATATGAATT | 4334 | GAUGUGCAUAUGAAUU |
| intron1 | | | | ACCTTTGATTTTCA | | ACCUUUGAUUUUCA |
| STMN2_ | + | GTT | 2329 | CTCAAACTTTGATGTG | 4335 | CUCAAACUUUGAUGUG |
| intron1 | | C | | CATATGAATTACCT | | CAUAUGAAUUACCU |
| STMN2_ | + | ATT | 2330 | CTGTGTTCCTCAAACT | 4336 | CUGUGUUCCUCAAACU |
| intron1 | | A | | TTGATGTGCATATG | | UUGAUGUGCAUAUG |
| STMN2_ | + | TTT | 2331 | ATAGTGTCATATTACT | 4337 | AUAGUGUCAUAUUACU |
| intron1 | | A | | GTGTTCCTCAAACT | | GUGUUCCUCAAACU |
| STMN2_ | + | ATT | 2332 | AATAGTGTCATATTAC | 4338 | AAUAGUGUCAUAUUAC |
| intron1 | | T | | TGTGTTCCTCAAAC | | UGUGUUCCUCAAAC |
| STMN2_ | + | ATT | 2333 | TAATCCAGCTATAAA | 4339 | UAAUCCAGCUAUAAAA |
| intron1 | | C | | ATATTTAATAGTGTC | | UAUUUAAUAGUGUC |
| STMN2_ | + | TTT | 2334 | TGTAATTCTAATCCAG | 4340 | UGUAAUUCUAAUCCAG |
| intron1 | | A | | CTATAAAATATTTA | | CUAUAAAAUAUUUA |
| STMN2_ | + | TTTT | 2335 | ATGTAATTCTAATCCA | 4341 | AUGUAAUUCUAAUCCA |
| intron1 | | | | GCTATAAAATATTT | | GCUAUAAAAUAUUU |
| STMN2_ | + | TTT | 2336 | ATTATCTTTTAATAAA | 4342 | AUUAUCUUUUAAUAAA |
| intron1 | | A | | GGAATCAGGCCCTG | | GGAAUCAGGCCCUG |
| STMN2_ | + | ATT | 2337 | TATGTAATTCTAATCC | 4343 | UAUGUAAUUCUAAUCC |
| intron1 | | T | | AGCTATAAAATATT | | AGCUAUAAAAUAUU |
| STMN2_ | + | ATT | 2338 | CATTTTATGTAATTCT | 4344 | CAUUUUAUGUAAUUCU |
| intron1 | | A | | AATCCAGCTATAAA | | AAUCCAGCUAUAAA |
| STMN2_ | + | TTT | 2339 | GGGATATTAACTTGTA | 4345 | GGGAUAUUAACUUGUA |
| intron1 | | A | | ATATACAGGTATCC | | AUAUACAGGUAUCC |
| STMN2_ | + | ATT | 2340 | ACTTGTAATATACAGG | 4346 | ACUUGUAAUAUACAGG |
| intron1 | | A | | TATCCCTCCTGGTA | | UAUCCCUCCUGGUA |
| STMN2_ | + | CTT | 2341 | TAATATACAGGTATCC | 4347 | UAAUAUACAGGUAUCC |
| intron1 | | G | | CTCCTGGTAAGCTC | | CUCCUGGUAAGCUC |
| STMN2_ | + | ATT | 2342 | TGTCTTAACATTTTTA | 4348 | UGUCUUAACAUUUUUA |
| intron1 | | A | | AATCTATGGTAATC | | AAUCUAUGGUAAUC |
| STMN2_ | + | TTT | 2343 | GCTCTCTGTGTGAGCA | 4349 | GCUCUCUGUGUGAGCA |
| intron1 | | G | | TGTGTGCGTGTGTG | | UGUGUGCGUGUGUG |
| STMN2_ | + | ATT | 2344 | GGCTCTCTGTGTGAGC | 4350 | GGCUCUCUGUGUGAGC |
| intron1 | | T | | ATGTGTGCGTGTGT | | AUGUGUGCGUGUGU |
| STMN2_ | + | ATT | 2345 | CAGGACTCGGCAGAA | 4351 | CAGGACUCGGCAGAAG |
| intron1 | | G | | GACCTTCGAGAGAAA | | ACCUUCGAGAGAAA |
| STMN2_ | + | ATT | 2346 | ATATTGCAGGACTCG | 4352 | AUAUUGCAGGACUCGG |
| intron1 | | C | | GCAGAAGACCTTCGA | | CAGAAGACCUUCGA |
| STMN2_ | + | ATT | 2347 | TATTCATATTGCAGGA | 4353 | UAUUCAUAUUGCAGGA |
| intron1 | | A | | CTCGGCAGAAGACC | | CUCGGCAGAAGACC |
| STMN2_ | + | TTT | 2348 | AAATTATATTCATATT | 4354 | AAAUUAUAUUCAUAUU |
| intron1 | | A | | GCAGGACTCGGCAG | | GCAGGACUCGGCAG |
| STMN2_ | + | TTTT | 2349 | AAAATTATATTCATAT | 4355 | AAAAUUAUAUUCAUAU |
| intron1 | | | | TGCAGGACTCGGCA | | UGCAGGACUCGGCA |
| STMN2_ | + | TTTT | 2350 | TAAAATTATATTCATA | 4356 | UAAAAUUAUAUUCAUA |
| intron1 | | | | TTGCAGGACTCGGC | | UUGCAGGACUCGGC |
| STMN2_ | + | ATT | 2351 | TTAAAATTATATTCAT | 4357 | UUAAAAUUAUAUUCAU |
| intron1 | | T | | ATTGCAGGACTCGG | | AUUGCAGGACUCGG |
| STMN2_ | + | ATT | 2352 | GATTTTTAAAATTATA | 4358 | GAUUUUUAAAAUUAUA |
| intron1 | | G | | TTCATATTGCAGGA | | UUCAUAUUGCAGGA |
| STMN2_ | + | CTT | 2353 | ATTGGATTTTTAAAAT | 4359 | AUUGGAUUUUUAAAAU |
| intron1 | | A | | TATATTCATATTGC | | UAUAUUCAUAUUGC |
| STMN2_ | + | GTT | 2354 | TGCCCCATCACTCTCT | 4360 | UGCCCCAUCACUCUCU |
| intron1 | | C | | CTTAATTGGATTTT | | CUUAAUUGGAUUUU |
| STMN2_ | + | ATT | 2355 | TGTGTTCTGCCCCATC | 4361 | UGUGUUCUGCCCCAUC |
| intron1 | | A | | ACTCTCTCTTAATT | | ACUCUCUCUUAAUU |
| STMN2_ | + | GTT | 2356 | ACAAGGATGATAAAT | 4362 | ACAAGGAUGAUAAAUC |
| intron1 | | G | | CAATAATGCAAGCTT | | AAUAAUGCAAGCUU |
| STMN2_ | + | ATT | 2357 | CTCTGGGAATTATGTG | 4363 | CUCUGGGAAUUAUGUG |
| intron1 | | A | | TTCTGCCCCATCAC | | UUCUGCCCCAUCAC |
| STMN2_ | + | TTTT | 2358 | ATTACTCTGGGAATTA | 4364 | AUUACUCUGGGAAUUA |
| intron1 | | | | TGTGTTCTGCCCCA | | UGUGUUCUGCCCCA |
| STMN2_ | + | ATT | 2359 | TATTACTCTGGGAATT | 4365 | UAUUACUCUGGGAAUU |
| intron1 | | T | | ATGTGTTCTGCCCC | | AUGUGUUCUGCCCC |
| STMN2_ | + | CTT | 2360 | CGAACTCATATACCTG | 4366 | CGAACUCAUAUACCUG |
| intron1 | | C | | GGGATTTTATTACT | | GGGAUUUUAUUACU |
| STMN2_ | + | TTT | 2361 | CTTCCGAACTCATATA | 4367 | CUUCCGAACUCAUAUA |
| intron1 | | A | | CCTGGGGATTTTAT | | CCUGGGGAUUUUAU |
| STMN2_ | + | TTTT | 2362 | ACTTCCGAACTCATAT | 4368 | ACUUCCGAACUCAUAU |
| intron1 | | | | ACCTGGGGATTTTA | | ACCUGGGGAUUUUA |
| STMN2_ | + | ATT | 2363 | TACTTCCGAACTCATA | 4369 | UACUUCCGAACUCAUA |
| intron1 | | T | | TACCTGGGGATTTT | | UACCUGGGGAUUUU |
| STMN2_ | + | TTT | 2364 | CAAAATATTTTACTTC | 4370 | CAAAAUAUUUUACUUC |
| intron1 | | A | | CGAACTCATATACC | | CGAACUCAUAUACC |
| STMN2_ | + | CTTT | 2365 | ACAAAATATTTTACTT | 4371 | ACAAAAUAUUUUACUU |
| intron1 | | | | CCGAACTCATATAC | | CCGAACUCAUAUAC |
| STMN2_ | + | TTT | 2366 | AATCTATGGTAATCTT | 4372 | AAUCUAUGGUAAUCUU |
| intron1 | | A | | TACAAAATATTTTA | | UACAAAAUAUUUUA |
| STMN2_ | + | TTTT | 2367 | AAATCTATGGTAATCT | 4373 | AAAUCUAUGGUAAUCU |
| intron1 | | | | TTACAAAATATTTT | | UUACAAAAUAUUUU |
| STMN2_ | + | TTTT | 2368 | TAAATCTATGGTAATC | 4374 | UAAAUCUAUGGUAAUC |
| intron1 | | | | TTTACAAAATATTT | | UUUACAAAAUAUUU |
| STMN2_ | + | ATT | 2369 | TTAAATCTATGGTAAT | 4375 | UUAAAUCUAUGGUAAU |
| intron1 | | T | | CTTTACAAAATATT | | CUUUACAAAAUAUU |
| STMN2_ | + | CTT | 2370 | ACATTTTTAAATCTAT | 4376 | ACAUUUUUAAAUCUAU |
| intron1 | | A | | GGTAATCTTTACAA | | GGUAAUCUUUACAA |
| STMN2_ | + | TTT | 2371 | TTACTCTGGGAATTAT | 4377 | UUACUCUGGGAAUUAU |
| intron1 | | A | | GTGTTCTGCCCCAT | | GUGUUCUGCCCCAU |
| STMN2_ | + | TTTC | 2372 | TTGTACATTGAAGGA | 4378 | UUGUACAUUGAAGGAA |
| intron1 | | | | AAGGAAGACACACTT | | AGGAAGACACACUU |
| STMN2_ | + | CTT | 2373 | GAGAGAAAGGTAGAA | 4379 | GAGAGAAAGGUAGAAA |
| intron1 | | C | | AATAAGAATTTGGCT | | AUAAGAAUUUGGCU |
| STMN2_ | + | ATT | 2374 | AAGGAAAGGAAGACA | 4380 | AAGGAAAGGAAGACAC |
| intron1 | | G | | CACTTAAGACAGCAT | | ACUUAAGACAGCAU |
| STMN2_ | + | CTT | 2375 | ATCTCCTCAGTCCCAT | 4381 | AUCUCCUCAGUCCCAU |
| intron1 | | A | | CATGGTTAGCACAT | | CAUGGUUAGCACAU |
| STMN2_ | + | ATT | 2376 | ACTTAATCTCCTCAGT | 4382 | ACUUAAUCUCCUCAGU |
| intron1 | | G | | CCCATCATGGTTAG | | CCCAUCAUGGUUAG |
| STMN2_ | + | GTT | 2377 | CAGAAATAACATTGA | 4383 | CAGAAAUAACAUUGAC |
| intron1 | | c | | CTTAATCTCCTCAGT | | UUAAUCUCCUCAGU |
| STMN2_ | + | TTTC | 2378 | TGGTGGGAACACACT | 4384 | UGGUGGGAACACACUC |
| intron1 | | | | CTGATGACCAGTTCC | | UGAUGACCAGUUCC |
| STMN2_ | + | ATT | 2379 | CTGGTGGGAACACAC | 4385 | CUGGUGGGAACACACU |
| intron1 | | T | | TCTGATGACCAGTTC | | CUGAUGACCAGUUC |
| STMN2_ | + | GTT | 2380 | TGCAGGCTCAGCACA | 4386 | UGCAGGCUCAGCACAG |
| intron1 | | C | | GCATCGATTTCTGGT | | CAUCGAUUUCUGGU |
| STMN2_ | + | GTT | 2381 | TAACGTATGAGACAC | 4387 | UAACGUAUGAGACACA |
| intron1 | | G | | ATGGCGTTCTGCAGG | | UGGCGUUCUGCAGG |
| STMN2_ | + | TTT | 2382 | GGAGAAAGAGAGCTA | 4388 | GGAGAAAGAGAGCUAU |
| intron1 | | G | | TGAGGCCGTGTGGGT | | GAGGCCGUGUGGGU |
| STMN2_ | + | CTTT | 2383 | GGGAGAAAGAGAGCT | 4389 | GGGAGAAAGAGAGCUA |
| intron1 | | | | ATGAGGCCGTGTGGG | | UGAGGCCGUGUGGG |
| STMN2_ | + | TTT | 2384 | GGCTTTGGGAGAAAG | 4390 | GGCUUUGGGAGAAAGA |
| intron1 | | A | | AGAGCTATGAGGCCG | | GAGCUAUGAGGCCG |
| STMN2_ | + | ATT | 2385 | AGGCTTTGGGAGAAA | 4391 | AGGCUUUGGGAGAAAG |
| intron1 | | T | | GAGAGCTATGAGGCC | | AGAGCUAUGAGGCC |
| STMN2_ | + | ATT | 2386 | CCATGATTTAGGCTTT | 4392 | CCAUGAUUUAGGCUUU |
| intron1 | | G | | GGGAGAAAGAGAGC | | GGGAGAAAGAGAGC |
| STMN2_ | + | ATT | 2387 | AAATAATTGCCATGAT | 4393 | AAAUAAUUGCCAUGAU |
| intron1 | | C | | TTAGGCTTTGGGAG | | UUAGGCUUUGGGAG |
| STMN2_ | + | CTT | 2388 | TTCAAATAATTGCCAT | 4394 | UUCAAAUAAUUGCCAU |
| intron1 | | A | | GATTTAGGCTTTGG | | GAUUUAGGCUUUGG |
| STMN2_ | + | CTT | 2389 | CCTGGGGCTTATTCAA | 4395 | CCUGGGGCUUAUUCAA |
| intron1 | | A | | ATAATTGCCATGAT | | AUAAUUGCCAUGAU |
| STMN2_ | + | TTT | 2390 | ATAGCTTACCTGGGGC | 4396 | AUAGCUUACCUGGGGC |
| intron1 | | A | | TTATTCAAATAATT | | UUAUUCAAAUAAUU |
| STMN2_ | + | TTTT | 2391 | AATAGCTTACCTGGG | 4397 | AAUAGCUUACCUGGGG |
| intron1 | | | | GCTTATTCAAATAAT | | CUUAUUCAAAUAAU |
| STMN2_ | + | GTT | 2392 | TAATAGCTTACCTGGG | 4398 | UAAUAGCUUACCUGGG |
| intron1 | | T | | GCTTATTCAAATAA | | GCUUAUUCAAAUAA |
| STMN2_ | + | ATT | 2393 | ATGCCTAGTTTTAATA | 4399 | AUGCCUAGUUUUAAUA |
| intron1 | | G | | GCTTACCTGGGGCT | | GCUUACCUGGGGCU |
| STMN2_ | + | CTT | 2394 | CAAATTGATGCCTAGT | 4400 | CAAAUUGAUGCCUAGU |
| intron1 | | C | | TTTAATAGCTTACC | | UUUAAUAGCUUACC |
| STMN2_ | + | CTT | 2395 | AAGAGAAAATACTTC | 4401 | AAGAGAAAAUACUUCC |
| intron1 | | G | | CAAATTGATGCCTAG | | AAAUUGAUGCCUAG |
| STMN2_ | + | TTTC | 2396 | TGATCACAGACTCACC | 4402 | UGAUCACAGACUCACC |
| intron1 | | | | TTGAAGAGAAAATA | | UUGAAGAGAAAAUA |
| STMN2_ | + | CTTT | 2397 | CTGATCACAGACTCAC | 4403 | CUGAUCACAGACUCAC |
| intron1 | | | | CTTGAAGAGAAAAT | | CUUGAAGAGAAAAU |
| STMN2_ | + | CTT | 2398 | TCCTTTCTGATCACAG | 4404 | UCCUUUCUGAUCACAG |
| intron1 | | C | | ACTCACCTTGAAGA | | ACUCACCUUGAAGA |
| STMN2_ | + | TTT | 2399 | AACAGACCAGAGATG | 4405 | AACAGACCAGAGAUGG |
| intron1 | | A | | GTCTTCTCCTTTCTG | | UCUUCUCCUUUCUG |
| STMN2_ | + | ATT | 2400 | AAACAGACCAGAGAT | 4406 | AAACAGACCAGAGAUG |
| intron1 | | T | | GGTCTTCTCCTTTCT | | GUCUUCUCCUUUCU |
| STMN2_ | + | TTT | 2401 | TTTAAACAGACCAGA | 4407 | UUUAAACAGACCAGAG |
| intron1 | | A | | GATGGTCTTCTCCTT | | AUGGUCUUCUCCUU |
| STMN2_ | + | GTT | 2402 | GCACATTTCAAAATGC | 4408 | GCACAUUUCAAAAUGC |
| intron1 | | A | | CTCCTTAACTACTT | | CUCCUUAACUACUU |
| STMN2_ | + | TTTT | 2403 | TAATTATCTTTTAATA | 4409 | UAAUUAUCUUUUAAUA |
| intron1 | | | | AAGGAATCAGGCCC | | AAGGAAUCAGGCCC |
| STMN2_ | + | TTTC | 2404 | AAAATGCCTCCTTAAC | 4410 | AAAAUGCCUCCUUAAC |
| intron1 | | | | TACTTCCATAGGCC | | UACUUCCAUAGGCC |
| STMN2_ | + | CTT | 2405 | ACTACTTCCATAGGCC | 4411 | ACUACUUCCAUAGGCC |
| intron1 | | A | | AGAGATATTTAGTT | | AGAGAUAUUUAGUU |
| STMN2_ | + | ATT | 2406 | TTAATTATCTTTTAAT | 4412 | UUAAUUAUCUUUUAAU |
| intron1 | | T | | AAAGGAATCAGGCC | | AAAGGAAUCAGGCC |
| STMN2_ | + | CTT | 2407 | TGAAACATTTTTAATT | 4413 | UGAAACAUUUUUAAUU |
| intron1 | | G | | ATCTTTTAATAAAG | | AUCUUUUAAUAAAG |
| STMN2_ | + | CTT | 2408 | TACATTGAAGGAAAG | 4414 | UACAUUGAAGGAAAGG |
| intron1 | | G | | GAAGACACACTTAAG | | AAGACACACUUAAG |
| STMN2_ | + | TTT | 2409 | AATCCCTTGTGAAACA | 4415 | AAUCCCUUGUGAAACA |
| intron1 | | G | | TTTTTAATTATCTT | | UUUUUAAUUAUCUU |
| STMN2_ | + | TTTT | 2410 | GAATCCCTTGTGAAAC | 4416 | GAAUCCCUUGUGAAAC |
| intron1 | | | | ATTTTTAATTATGT | | AUUUUUAAUUAUCU |
| STMN2_ | + | GTT | 2411 | TGAATCCCTTGTGAAA | 4417 | UGAAUCCCUUGUGAAA |
| intron1 | | T | | CATTTTTAATTATC | | CAUUUUUAAUUAUC |
| STMN2_ | + | ATT | 2412 | CCATCAAAGCAGGCA | 4418 | CCAUCAAAGCAGGCAG |
| intron1 | | A | | GGCAGGCAGGAGAGA | | GCAGGCAGGAGAGA |
| STMN2_ | + | CTT | 2413 | ATATTACCATCAAAGC | 4419 | AUAUUACCAUCAAAGC |
| intron1 | | C | | AGGCAGGCAGGCAG | | AGGCAGGCAGGCAG |
| STMN2_ | + | ATT | 2414 | TCTTCATATTACCATC | 4420 | UCUUCAUAUUACCAUC |
| intron1 | | C | | AAAGCAGGCAGGCA | | AAAGCAGGCAGGCA |
| STMN2_ | + | TTTC | 2415 | AAGATTCTCTTCATAT | 4421 | AAGAUUCUCUUCAUAU |
| intron1 | | | | TACCATCAAAGCAG | | UACCAUCAAAGCAG |
| STMN2_ | + | ATT | 2416 | CAAGATTCTCTTCATA | 4422 | CAAGAUUCUCUUCAUA |
| intron1 | | T | | TTACCATCAAAGCA | | UUACCAUCAAAGCA |
| STMN2_ | + | GTT | 2417 | TTTCAAGATTCTCTTC | 4423 | UUUCAAGAUUCUCUUC |
| intron1 | | A | | ATATTACCATCAAA | | AUAUUACCAUCAAA |
| STMN2_ | + | ATT | 2418 | GATGTTATTTCAAGAT | 4424 | GAUGUUAUUUCAAGAU |
| intron1 | | A | | TCTCTTCATATTAC | | UCUCUUCAUAUUAC |
| STMN2_ | + | TTTT | 2419 | ATTTAAACAGACCAG | 4425 | AUUUAAACAGACCAGA |
| intron1 | | | | AGATGGTCTTCTCCT | | GAUGGUCUUCUCCU |
| STMN2_ | + | TTT | 2420 | ATATAACTATTAGATG | 4426 | AUAUAACUAUUAGAUG |
| intron1 | | A | | TTATTTCAAGATTC | | UUAUUUCAAGAUUC |
| STMN2_ | + | ATT | 2421 | ACATTTAATATAACTA | 4427 | ACAUUUAAUAUAACUA |
| intron1 | | C | | TTAGATGTTATTTC | | UUAGAUGUUAUUUC |
| STMN2_ | + | TTT | 2422 | CACATTCACATTTAAT | 4428 | CACAUUCACAUUUAAU |
| intron1 | | A | | ATAACTATTAGATG | | AUAACUAUUAGAUG |
| STMN2_ | + | ATT | 2423 | ACACATTCACATTTAA | 4429 | ACACAUUCACAUUUAA |
| intron1 | | T | | TATAACTATTAGAT | | UAUAACUAUUAGAU |
| STMN2_ | + | GTT | 2424 | AATAAAATAAATTTA | 4430 | AAUAAAAUAAAUUUAC |
| intron1 | | G | | CACATTCACATTTAA | | ACAUUCACAUUUAA |
| STMN2_ | + | TTT | 2425 | TTGAATAAAATAAATT | 4431 | UUGAAUAAAAUAAAUU |
| intron1 | | G | | TACACATTCACATT | | UACACAUUCACAUU |
| STMN2_ | + | TTTT | 2426 | GTTGAATAAAATAAA | 4432 | GUUGAAUAAAAUAAAU |
| intron1 | | | | TTTACACATTCACAT | | UUACACAUUCACAU |
| STMN2_ | + | ATT | 2427 | TGTTGAATAAAATAA | 4433 | UGUUGAAUAAAAUAAA |
| intron1 | | T | | ATTTACACATTCACA | | UUUACACAUUCACA |
| STMN2_ | + | TTT | 2428 | ACATTTTGTTGAATAA | 4434 | ACAUUUUGUUGAAUAA |
| intron1 | | A | | AATAAATTTACACA | | AAUAAAUUUACACA |
| STMN2_ | + | TTTT | 2429 | AACATTTTGTTGAATA | 4435 | AACAUUUUGUUGAAUA |
| intron1 | | | | AAATAAATTTACAC | | AAAUAAAUUUACAC |
| STMN2_ | + | GTT | 2430 | TAACATTTTGTTGAAT | 4436 | UAACAUUUUGUUGAAU |
| intron1 | | T | | AAAATAAATTTACA | | AAAAUAAAUUUACA |
| STMN2_ | + | TTT | 2431 | GTTTTAACATTTTGTT | 4437 | GUUUUAACAUUUUGUU |
| intron1 | | A | | GAATAAAATAAATT | | GAAUAAAAUAAAUU |
| STMN2_ | + | ATT | 2432 | AGTTTTAACATTTTGT | 4438 | AGUUUUAACAUUUUGU |
| intron1 | | T | | TGAATAAAATAAAT | | UGAAUAAAAUAAAU |
| STMN2_ | + | CTT | 2433 | CATAGGCCAGAGATA | 4439 | CAUAGGCCAGAGAUAU |
| intron1 | | C | | TTTAGTTTTAACATT | | UUAGUUUUAACAUU |
| STMN2_ | + | ATT | 2434 | AATATAACTATTAGAT | 4440 | AAUAUAACUAUUAGAU |
| intron1 | | T | | GTTATTTCAAGATT | | GUUAUUUCAAGAUU |
| STMN2_ | + | ATT | 2435 | TATTTAAACAGACCA | 4441 | UAUUUAAACAGACCAG |
| intron1 | | T | | GAGATGGTCTTCTCC | | AGAUGGUCUUCUCC |
| STMN2_ | + | ATT | 2436 | CAAAATGCCTCCTTAA | 4442 | CAAAAUGCCUCCUUAA |
| intron1 | | T | | CTACTTCCATAGGC | | CUACUUCCAUAGGC |
| STMN2_ | + | GTT | 2437 | GAGGTGAGCTCCCATT | 4443 | GAGGUGAGCUCCCAUU |
| intron1 | | A | | GCAGAGGTCACACC | | GCAGAGGUCACACC |
| STMN2_ | + | TTTC | 2438 | TGGTGTATTCATAAAT | 4444 | UGGUGUAUUCAUAAAU |
| intron1 | | | | TCCAGATTCTCTAT | | UCCAGAUUCUCUAU |
| STMN2_ | + | TTTT | 2439 | CTGGTGTATTCATAAA | 4445 | CUGGUGUAUUCAUAAA |
| intron1 | | | | TTCCAGATTCTCTA | | UUCCAGAUUCUCUA |
| STMN2_ | + | TTTT | 2440 | TCTGGTGTATTCATAA | 4446 | UCUGGUGUAUUCAUAA |
| intron1 | | | | ATTCCAGATTCTCT | | AUUCCAGAUUCUCU |
| STMN2_ | + | GTT | 2441 | TTCTGGTGTATTCATA | 4447 | UUCUGGUGUAUUCAUA |
| intron1 | | T | | AATTCCAGATTCTC | | AAUUCCAGAUUCUC |
| STMN2_ | + | TTTC | 2442 | AACTGTTTTTCTGGTG | 4448 | AACUGUUUUUCUGGUG |
| intron1 | | | | TATTCATAAATTCC | | UAUUCAUAAAUUCC |
| STMN2_ | + | CTTT | 2443 | CAACTGTTTTTCTGGT | 4449 | CAACUGUUUUUCUGGU |
| intron1 | | | | GTATTCATAAATTC | | GUAUUCAUAAAUUC |
| STMN2_ | + | TTTC | 2444 | TTTCAACTGTTTTTCT | 4450 | UUUCAACUGUUUUUCU |
| intron1 | | | | GGTGTATTCATAAA | | GGUGUAUUCAUAAA |
| STMN2_ | + | CTTT | 2445 | CTTTCAACTGTTTTTC | 4451 | CUUUCAACUGUUUUUC |
| intron1 | | | | TGGTGTATTCATAA | | UGGUGUAUUCAUAA |
| STMN2_ | + | TTTC | 2446 | CCGCAATGGTGCTTTC | 4452 | CCGCAAUGGUGCUUUC |
| intron1 | | | | TTTCAACTGTTTTT | | UUUCAACUGUUUUU |
| STMN2_ | + | TTTT | 2447 | CCCGCAATGGTGCTTT | 4453 | CCCGCAAUGGUGCUUU |
| intron1 | | | | CTTTCAACTGTTTT | | CUUUCAACUGUUUU |
| STMN2_ | + | ATT | 2448 | TCCCGCAATGGTGCTT | 4454 | UCCCGCAAUGGUGCUU |
| intron1 | | T | | TCTTTCAACTGTTT | | UCUUUCAACUGUUU |
| STMN2_ | + | TTT | 2449 | CTCAAACATTTTCCCG | 4455 | CUCAAACAUUUUCCCG |
| intron1 | | A | | CAATGGTGCTTTCT | | CAAUGGUGCUUUCU |
| STMN2_ | + | TTTC | 2450 | TTTACTCAAACATTTT | 4456 | UUUACUCAAACAUUUU |
| intron1 | | | | CCCGCAATGGTGCT | | CCCGCAAUGGUGCU |
| STMN2_ | + | ATT | 2451 | ATAAATTCCAGATTCT | 4457 | AUAAAUUCCAGAUUCU |
| intron1 | | C | | CTATGGGAAGTAAC | | CUAUGGGAAGUAAC |
| STMN2_ | + | ATT | 2452 | CTTTACTCAAACATTT | 4458 | CUUUACUCAAACAUUU |
| intron1 | | T | | TCCCGCAATGGTGC | | UCCCGCAAUGGUGC |
| STMN2_ | + | CTT | 2453 | AGGGCCTCGAGCCAA | 4459 | AGGGCCUCGAGCCAAU |
| intron1 | | G | | TAAGTCTTCCTATTT | | AAGUCUUCCUAUUU |
| STMN2_ | + | TTT | 2454 | GAGATGACAAAAATC | 4460 | GAGAUGACAAAAAUCU |
| intron1 | | G | | TAAACTTGAGGGCCT | | AAACUUGAGGGCCU |
| STMN2_ | + | ATT | 2455 | GGAGATGACAAAAAT | 4461 | GGAGAUGACAAAAAUC |
| intron1 | | T | | CTAAACTTGAGGGCC | | UAAACUUGAGGGCC |
| STMN2_ | + | ATT | 2456 | TGGCAGTCGGGCAGG | 4462 | UGGCAGUCGGGCAGGG |
| intron1 | | C | | GCTCTCTGTATAACC | | CUCUCUGUAUAACC |
| STMN2_ | + | TTT | 2457 | ATTCTGGCAGTCGGGC | 4463 | AUUCUGGCAGUCGGGC |
| intron1 | | A | | AGGGCTCTCTGTAT | | AGGGCUCUCUGUAU |
| STMN2_ | + | GTT | 2458 | AATTCTGGCAGTCGG | 4464 | AAUUCUGGCAGUCGGG |
| intron1 | | T | | GCAGGGCTCTCTGTA | | CAGGGCUCUCUGUA |
| STMN2_ | + | TTT | 2459 | AATGTTTAATTCTGGC | 4465 | AAUGUUUAAUUCUGGC |
| intron1 | | A | | AGTCGGGCAGGGCT | | AGUCGGGCAGGGCU |
| STMN2_ | + | TTTT | 2460 | AAATGTTTAATTCTGG | 4466 | AAAUGUUUAAUUCUGG |
| intron1 | | | | CAGTCGGGCAGGGC | | CAGUCGGGCAGGGC |
| STMN2_ | + | GTT | 2461 | TAAATGTTTAATTCTG | 4467 | UAAAUGUUUAAUUCUG |
| intron1 | | T | | GCAGTCGGGCAGGG | | GCAGUCGGGCAGGG |
| STMN2_ | + | ATT | 2462 | CAGAGGTCACACCTGT | 4468 | CAGAGGUCACACCUGU |
| intron1 | | G | | GATATCACCATTTT | | GAUAUCACCAUUUU |
| STMN2_ | + | ATT | 2463 | ATGTTTTAAATGTTTA | 4469 | AUGUUUUAAAUGUUUA |
| intron1 | | C | | ATTCTGGCAGTCGG | | AUUCUGGCAGUCGG |
| STMN2_ | + | ATT | 2464 | CAAAAGTAATTCATGT | 4470 | CAAAAGUAAUUCAUGU |
| intron1 | | A | | TTTAAATGTTTAAT | | UUUAAAUGUUUAAU |
| STMN2_ | + | CTT | 2465 | AGACAGCATTACAAA | 4471 | AGACAGCAUUACAAAA |
| intron1 | | A | | AGTAATTCATGTTTT | | GUAAUUCAUGUUUU |
| STMN2_ | + | CTT | 2466 | CTATTTCTTTACTCAA | 4472 | CUAUUUCUUUACUCAA |
| intron1 | | c | | ACATTTTCCCGCAA | | ACAUUUUCCCGCAA |
| STMN2_ | + | ATT | 2467 | CAGATTCTCTATGGGA | 4473 | CAGAUUCUCUAUGGGA |
| intron1 | | C | | AGTAACTTTTATTG | | AGUAACUUUUAUUG |
| STMN2_ | + | CTTT | 2468 | ACTCAAACATTTTCCC | 4474 | ACUCAAACAUUUUCCC |
| intron1 | | | | GCAATGGTGCTTTC | | GCAAUGGUGCUUUC |
| STMN2_ | + | CTT | 2469 | CTCAAGGTCACACAGT | 4475 | CUCAAGGUCACACAGU |
| intron1 | | A | | TAGTCAGATCCAGA | | UAGUCAGAUCCAGA |
| STMN2_ | + | ATT | 2470 | TCTATGGGAAGTAACT | 4476 | UCUAUGGGAAGUAACU |
| intron1 | | C | | TTTATTGATTGATT | | UUUAUUGAUUGAUU |
| STMN2_ | + | TTTC | 2471 | ACCGATTGCTGCTAGT | 4477 | ACCGAUUGCUGCUAGU |
| intron1 | | | | CTCATATCTGTTCC | | CUCAUAUCUGUUCC |
| STMN2_ | + | CTTT | 2472 | CACCGATTGCTGCTAG | 4478 | CACCGAUUGCUGCUAG |
| intron1 | | | | TCTCATATCTGTTC | | UCUCAUAUCUGUUC |
| STMN2_ | + | CTT | 2473 | GGAATCCATCTTTCAC | 4479 | GGAAUCCAUCUUUCAC |
| intron1 | | C | | CGATTGCTGCTAGT | | CGAUUGCUGCUAGU |
| STMN2_ | + | TTT | 2474 | GGCCCAGGCCATCTG | 4480 | GGCCCAGGCCAUCUGG |
| intron1 | | G | | GCTTCGGAATCCATC | | CUUCGGAAUCCAUC |
| STMN2_ | + | ATT | 2475 | GGGCCCAGGCCATCT | 4481 | GGGCCCAGGCCAUCUG |
| intron1 | | T | | GGCTTCGGAATCCAT | | GCUUCGGAAUCCAU |
| STMN2_ | + | GTT | 2476 | GTCAGATCCAGAATTT | 4482 | GUCAGAUCCAGAAUUU |
| intron1 | | A | | GGGCCCAGGCCATC | | GGGCCCAGGCCAUC |
| STMN2_ | + | GTT | 2477 | AAGTATCTTACTCAAG | 4483 | AAGUAUCUUACUCAAG |
| intron1 | | G | | GTCACACAGTTAGT | | GUCACACAGUUAGU |
| STMN2_ | + | ATT | 2478 | CAGATATGGAAACTG | 4484 | CAGAUAUGGAAACUGA |
| intron1 | | A | | AGGCACAGAAAGTTG | | GGCACAGAAAGUUG |
| STMN2_ | + | GTT | 2479 | TATTACAGATATGGA | 4485 | UAUUACAGAUAUGGAA |
| intron1 | | C | | AACTGAGGCACAGAA | | ACUGAGGCACAGAA |
| STMN2_ | + | ATT | 2480 | CTGCTAGTCTCATATC | 4486 | CUGCUAGUCUCAUAUC |
| intron1 | | G | | TGTTCCATGTTAGA | | UGUUCCAUGUUAGA |
| STMN2_ | + | GTT | 2481 | ATCACTTAATAATCCT | 4487 | AUCACUUAAUAAUCCU |
| intron1 | | A | | AAGTAGGTTCTATT | | AAGUAGGUUCUAUU |
| STMN2_ | + | GTT | 2482 | CATGTTAGAGGTGAG | 4488 | CAUGUUAGAGGUGAGC |
| intron1 | | C | | CTCCCATTGCAGAGG | | UCCCAUUGCAGAGG |
| STMN2_ | + | CTT | 2483 | ATAATCCTAAGTAGGT | 4489 | AUAAUCCUAAGUAGGU |
| intron1 | | A | | TCTATTACAGATAT | | UCUAUUACAGAUAU |
| STMN2_ | + | TTTC | 2484 | CACATATTAACTGTGT | 4490 | CACAUAUUAACUGUGU |
| intron1 | | | | TAATCACTTAATAA | | UAAUCACUUAAUAA |
| STMN2_ | + | CTTT | 2485 | TATTGATTGATTTAAC | 4491 | UAUUGAUUGAUUUAAC |
| intron1 | | | | CCTTGTATAGCACA | | CCUUGUAUAGCACA |
| STMN2_ | + | TTTT | 2486 | ATTGATTGATTTAACC | 4492 | AUUGAUUGAUUUAACC |
| intron1 | | | | CTTGTATAGCACAT | | CUUGUAUAGCACAU |
| STMN2_ | + | TTT | 2487 | TTGATTGATTTAACCC | 4493 | UUGAUUGAUUUAACCC |
| intron1 | | A | | TTGTATAGCACATA | | UUGUAUAGCACAUA |
| STMN2_ | + | ATT | 2488 | ATTGATTTAACCCTTG | 4494 | AUUGAUUUAACCCUUG |
| intron1 | | G | | TATAGCACATATAA | | UAUAGCACAUAUAA |
| STMN2_ | + | ATT | 2489 | ATTTAACCCTTGTATA | 4495 | AUUUAACCCUUGUAUA |
| intron1 | | G | | GCACATATAACATG | | GCACAUAUAACAUG |
| STMN2_ | + | ATT | 2490 | ACTGTGTTAATCACTT | 4496 | ACUGUGUUAAUCACUU |
| intron1 | | A | | AATAATCCTAAGTA | | AAUAAUCCUAAGUA |
| STMN2_ | + | ATT | 2491 | AACCCTTGTATAGCAC | 4497 | AACCCUUGUAUAGCAC |
| intron1 | | T | | ATATAACATGCAAG | | AUAUAACAUGCAAG |
| STMN2_ | + | CTT | 2492 | TATAGCACATATAAC | 4498 | UAUAGCACAUAUAACA |
| intron1 | | G | | ATGCAAGGCATTGTT | | UGCAAGGCAUUGUU |
| STMN2_ | + | ATT | 2493 | TTCTAAGAACTTTCCA | 4499 | UUCUAAGAACUUUCCA |
| intron1 | | G | | CATATTAACTGTGT | | CAUAUUAACUGUGU |
| STMN2_ | + | GTT | 2494 | TAAGAACTTTCCACAT | 4500 | UAAGAACUUUCCACAU |
| intron1 | | C | | ATTAACTGTGTTAA | | AUUAACUGUGUUAA |
| STMN2_ | + | CTTT | 2495 | CCACATATTAACTGTG | 4501 | CCACAUAUUAACUGUG |
| intron1 | | | | TTAATCACTTAATA | | UUAAUCACUUAAUA |
| STMN2_ | + | TTT | 2496 | ACCCTTGTATAGCACA | 4502 | ACCCUUGUAUAGCACA |
| intron1 | | A | | TATAACATGCAAGG | | UAUAACAUGCAAGG |

* The three 3′ nucleotides represent the 5′−TTN−3′ motif.

[0094] The present disclosure includes all combinations of the direct repeat sequences and spacer sequences listed above, consistent with the present disclosure herein.

[0095] In some embodiments, a spacer sequence described herein comprises a uracil (U). In some embodiments, a spacer sequence described herein comprises a thymine (T). In some embodiments, a spacer sequence according to Table 5A or 5B comprises a sequence comprising a thymine in one or more (e.g., all) places indicated as uracil in Table 5A or 5B.

[0096] The present disclosure includes RNA guides that comprise any and all combinations of the direct repeats and spacers described herein (e.g., as set forth in Table 5A or 5B, above).

[0097] In some embodiments, the RNA guide has at least 90% identity (e.g., at least 90%, 91%, 92%, 93%, 94%, 95%, 96%, 97%, 98% or 99% identity to any one of SEQ ID NOs: 4505-4562. In some embodiments, the RNA guide has at least 95% identity (e.g., at least 95%, 96%, 97%, 98% or 99% identity to any one of SEQ ID NOs: 4505-4562. In some embodiments, the RNA guide has a sequence set forth in any one of SEQ ID NOs: 4505-4562.

[0098] In some embodiments, the RNA guide comprises the sequence of any one of SEQ ID NOs: 4508, 4512, 4559, and 4561, or the second nucleic acid encodes an RNA guide comprising any one of SEQ ID NOs: 4508, 4512, 4559, and 4561.

[0099] In some embodiments, the RNA guide comprises the sequence of any one of SEQ ID NOs: 4505, 4506, 4507, 4508, 4509, 4510, 4511, 4512, 4513, 4514, 4515, 4554, 4555, 4556, 4557, 4558, 4559, 4560, 4561, and 4562, or the second nucleic acid encodes an RNA guide comprising any one of SEQ ID NOs: 4505, 4506, 4507, 4508, 4509, 4510, 4511, 4512, 4513, 4514, 4515, 4554, 4555, 4556, 4557, 4558, 4559, 4560, 4561, and 4562.

[0100] B. Nucleic Acid Modifications

[0101] The RNA guide may include one or more covalent modifications with respect to a reference sequence, in particular the parent polyribonucleotide, which are included within the scope of this disclosure.

[0102] Exemplary modifications can include any modification to the sugar, the nucleobase, the internucleoside linkage (e.g., to a linking phosphate/to a phosphodiester linkage/to the phosphodiester backbone), and any combination thereof. Some of the exemplary modifications provided herein are described in detail below.

[0103] The RNA guide may include any useful modification, such as to the sugar, the nucleobase, or the internucleoside linkage (e.g., to a linking phosphate/to a phosphodiester linkage/to the phosphodiester backbone). One or more atoms of a pyrimidine nucleobase may be replaced or substituted with optionally substituted amino, optionally substituted thiol, optionally substituted alkyl (e.g., methyl or ethyl), or halo (e.g., chloro or fluoro). In certain embodiments, modifications (e.g., one or more modifications) are present in each of the sugar and the internucleoside linkage. Modifications may be modifications of ribonucleic acids (RNAs) to deoxyribonucleic acids (DNAs), threose nucleic acids (TNAs), glycol nucleic acids (GNAs), peptide nucleic acids (PNAs), locked nucleic acids (LNAs) or hybrids thereof). Additional modifications are described herein.

[0104] In some embodiments, the modification may include a chemical or cellular induced modification. For example, some nonlimiting examples of intracellular RNA modifications are described by Lewis and Pan in “RNA modifications and structures cooperate to guide RNA-protein interactions” from Nat Reviews Mol Cell Biol, 2017, 18:202-210.

[0105] Different sugar modifications, nucleotide modifications, and/or internucleoside linkages (e.g., backbone structures) may exist at various positions in the sequence. One of ordinary skill in the art will appreciate that the nucleotide analogs or other modification(s) may be located at any position(s) of the sequence, such that the function of the sequence is not substantially decreased. The sequence may include from about 1% to about 100% modified nucleotides (either in relation to overall nucleotide content, or in relation to one or more types of nucleotide, i.e. any one or more of A, G, U or C) or any intervening percentage (e.g., from 1% to 20%>, from 1% to 25%, from 1% to 50%, from 1% to 60%, from 1% to 70%, from 1% to 80%, from 1% to 90%, from 1% to 95%, from 10% to 20%, from 10% to 25%, from 10% to 50%, from 10% to 60%, from 10% to 70%, from 10% to 80%, from 10% to 90%, from 10% to 95%, from 10% to 100%, from 20% to 25%, from 20% to 50%, from 20% to 60%, from 20% to 70%, from 20% to 80%, from 20% to 90%, from 20% to 95%, from 20% to 100%, from 50% to 60%, from 50% to 70%, from 50% to 80%, from 50% to 90%, from 50% to 95%, from 50% to 100%, from 70% to 80%, from 70% to 90%, from 70% to 95%, from 70% to 100%, from 80% to 90%, from 80% to 95%, from 80% to 100%, from 90% to 95%, from 90% to 100%, and from 95% to 100%).

[0106] In some embodiments, sugar modifications (e.g., at the 2′ position or 4′ position) or replacement of the sugar at one or more ribonucleotides of the sequence may, as well as backbone modifications, include modification or replacement of the phosphodiester linkages. Specific examples of a sequence include, but are not limited to, sequences including modified backbones or no natural internucleoside linkages such as internucleoside modifications, including modification or replacement of the phosphodiester linkages. Sequences having modified backbones include, among others, those that do not have a phosphorus atom in the backbone. For the purposes of this application, and as sometimes referenced in the art, modified RNAs that do not have a phosphorus atom in their internucleoside backbone can also be considered to be oligonucleosides. In particular embodiments, a sequence will include ribonucleotides with a phosphorus atom in its internucleoside backbone.

[0107] Modified sequence backbones may include, for example, phosphorothioates, chiral phosphorothioates, phosphorodithioates, phosphotriesters, aminoalkylphosphotriesters, methyl and other alkyl phosphonates such as 3′-alkylene phosphonates and chiral phosphonates, phosphinates, phosphoramidates such as 3′-amino phosphoramidate and aminoalkylphosphoramidates, thionophosphoramidates, thionoalkylphosphonates, thionoalkylphosphotriesters, and boranophosphates having normal 3′-5′ linkages, 2′-5′ linked analogs of these, and those having inverted polarity wherein the adjacent pairs of nucleoside units are linked 3′-5′ to 5′-3′ or 2′-5′ to 5′-2′. Various salts, mixed salts and free acid forms are also included. In some embodiments, the sequence may be negatively or positively charged.

[0108] The modified nucleotides, which may be incorporated into the sequence, can be modified on the internucleoside linkage (e.g., phosphate backbone). Herein, in the context of the polynucleotide backbone, the phrases “phosphate” and “phosphodiester” are used interchangeably. Backbone phosphate groups can be modified by replacing one or more of the oxygen atoms with a different substituent. Further, the modified nucleosides and nucleotides can include the wholesale replacement of an unmodified phosphate moiety with another internucleoside linkage as described herein. Examples of modified phosphate groups include, but are not limited to, phosphorothioate, phosphoroselenates, boranophosphates, boranophosphate esters, hydrogen phosphonates, phosphoramidates, phosphorodiamidates, alkyl or aryl phosphonates, and phosphotriesters. Phosphorodithioates have both non-linking oxygens replaced by sulfur. The phosphate linker can also be modified by the replacement of a linking oxygen with nitrogen (bridged phosphoramidates), sulfur (bridged phosphorothioates), and carbon (bridged methylene-phosphonates).

[0109] The α-thio substituted phosphate moiety is provided to confer stability to RNA and DNA polymers through the unnatural phosphorothioate backbone linkages. Phosphorothioate DNA and RNA have increased nuclease resistance and subsequently a longer half-life in a cellular environment.

[0110] In specific embodiments, a modified nucleoside includes an alpha-thio-nucleoside (e.g., 5′-O-(1-thiophosphate)-adenosine, 5′-O-(1-thiophosphate)-cytidine (a-thio-cytidine), 5′-O-(1-thiophosphate)-guanosine, 5′-O-(1-thiophosphate)-uridine, or 5′-O-(1-thiophosphate)-pseudouridine).

[0111] Other internucleoside linkages that may be employed according to the present disclosure, including internucleoside linkages which do not contain a phosphorous atom, are described herein.

[0112] In some embodiments, the sequence may include one or more cytotoxic nucleosides. For example, cytotoxic nucleosides may be incorporated into sequence, such as bifunctional modification. Cytotoxic nucleoside may include, but are not limited to, adenosine arabinoside, 5-azacytidine, 4′-thio-aracytidine, cyclopentenylcytosine, cladribine, clofarabine, cytarabine, cytosine arabinoside, 1-(2-C-cyano-2-deoxy-beta-D-arabino-pentofuranosyl)-cytosine, decitabine, 5-fluorouracil, fludarabine, floxuridine, gemcitabine, a combination of tegafur and uracil, tegafur ((RS)-5-fluoro-1-(tetrahydrofuran-2-yl)pyrimidine-2,4(1H,3H)-dione), troxacitabine, tezacitabine, 2′-deoxy-2′-methylidenecytidine (DMDC), and 6-mercaptopurine. Additional examples include fludarabine phosphate, N4-behenoyl-1-beta-D-arabinofuranosylcytosine, N4-octadecyl-1-beta-D-arabinofuranosylcytosine, N4-palmitoyl-1-(2-C-cyano-2-deoxy-beta-D-arabino-pentofuranosyl) cytosine, and P-4055 (cytarabine 5′-elaidic acid ester).

[0113] In some embodiments, the sequence includes one or more post-transcriptional modifications (e.g., capping, cleavage, polyadenylation, splicing, poly-A sequence, methylation, acylation, phosphorylation, methylation of lysine and arginine residues, acetylation, and nitrosylation of thiol groups and tyrosine residues, etc.). The one or more post-transcriptional modifications can be any post-transcriptional modification, such as any of the more than one hundred different nucleoside modifications that have been identified in RNA (Rozenski, J, Crain, P, and McCloskey, J. (1999). The RNA Modification Database: 1999 update. Nucl Acids Res 27: 196-197) In some embodiments, the first isolated nucleic acid comprises messenger RNA (mRNA). In some embodiments, the mRNA comprises at least one nucleoside selected from the group consisting of pyridin-4-one ribonucleoside, 5-aza-uridine, 2-thio-5-aza-uridine, 2-thiouridine, 4-thio-pseudouridine, 2-thio-pseudouridine, 5-hydroxyuridine, 3-methyluridine, 5-carboxymethyl-uridine, 1-carboxymethyl-pseudouridine, 5-propynyl-uridine, 1-propynyl-pseudouridine, 5-taurinomethyluridine, 1-taurinomethyl-pseudouridine, 5-taurinomethyl-2-thio-uridine, 1-taurinomethyl-4-thio-uridine, 5-methyl-uridine, 1-methyl-pseudouridine, 4-thio-1-methyl-pseudouridine, 2-thio-1-methyl-pseudouridine, 1-methyl-1-deaza-pseudouridine, 2-thio-1-methyl-1-deaza-pseudouridine, dihydrouridine, dihydropseudouridine, 2-thio-dihydrouridine, 2-thio-dihydropseudouridine, 2-methoxyuridine, 2-methoxy-4-thio-uridine, 4-methoxy-pseudouridine, and 4-methoxy-2-thio-pseudouridine. In some embodiments, the mRNA comprises at least one nucleoside selected from the group consisting of 5-aza-cytidine, pseudoisocytidine, 3-methyl-cytidine, N4-acetylcytidine, 5-formylcytidine, N4-methylcytidine, 5-hydroxymethylcytidine, 1-methyl-pseudoisocytidine, pyrrolo-cytidine, pyrrolo-pseudoisocytidine, 2-thio-cytidine, 2-thio-5-methyl-cytidine, 4-thio-pseudoisocytidine, 4-thio-1-methyl-pseudoisocytidine, 4-thio-1-methyl-1-deaza-pseudoisocytidine, 1-methyl-1-deaza-pseudoisocytidine, zebularine, 5-aza-zebularine, 5-methyl-zebularine, 5-aza-2-thio-zebularine, 2-thio-zebularine, 2-methoxy-cytidine, 2-methoxy-5-methyl-cytidine, 4-methoxy-pseudoisocytidine, and 4-methoxy-1-methyl-pseudoisocytidine. In some embodiments, the mRNA comprises at least one nucleoside selected from the group consisting of 2-aminopurine, 2, 6-diaminopurine, 7-deaza-adenine, 7-deaza-8-aza-adenine, 7-deaza-2-aminopurine, 7-deaza-8-aza-2-aminopurine, 7-deaza-2,6-diaminopurine, 7-deaza-8-aza-2,6-diaminopurine, 1-methyladenosine, N6-methyladenosine, N6-isopentenyladenosine, N6-(cis-hydroxyisopentenyl)adenosine, 2-methylthio-N6-(cis-hydroxyisopentenyl) adenosine, N6-glycinylcarbamoyladenosine, N6-threonylcarbamoyladenosine, 2-methylthio-N6-threonyl carbamoyladenosine, N6,N6-dimethyladenosine, 7-methyladenine, 2-methylthio-adenine, and 2-methoxy-adenine. In some embodiments, mRNA comprises at least one nucleoside selected from the group consisting of inosine, 1-methyl-inosine, wyosine, wybutosine, 7-deaza-guanosine, 7-deaza-8-aza-guanosine, 6-thio-guanosine, 6-thio-7-deaza-guanosine, 6-thio-7-deaza-8-aza-guanosine, 7-methyl-guanosine, 6-thio-7-methyl-guanosine, 7-methylinosine, 6-methoxy-guanosine, 1-methylguanosine, N2-methylguanosine, N2,N2-dimethylguanosine, 8-oxo-guanosine, 7-methyl-8-oxo-guanosine, 1-methyl-6-thio-guanosine, N2-methyl-6-thio-guanosine, and N2,N2-dimethyl-6-thio-guanosine.

[0114] The sequence may or may not be uniformly modified along the entire length of the molecule. For example, one or more or all types of nucleotides (e.g., naturally-occurring nucleotides, purine or pyrimidine, or any one or more or all of A, G, U, C, I, pU) may or may not be uniformly modified in the sequence, or in a given predetermined sequence region thereof. In some embodiments, the sequence includes a pseudouridine. In some embodiments, the sequence includes an inosine, which may aid in the immune system characterizing the sequence as endogenous versus viral RNAs. The incorporation of inosine may also mediate improved RNA stability/reduced degradation. See for example, Yu, Z. et al. (2015) RNA editing by ADAR1 marks dsRNA as “self”. Cell Res. 25, 1283-1284, which is incorporated by reference in its entirety.

[0115] In some embodiments, one or more of the nucleotides of an RNA guide comprises a 2′-O-methyl phosphorothioate modification. In some embodiments, each of the first three nucleotides of the RNA guide comprises a 2′-O-methyl phosphorothioate modification. In some embodiments, each of the last four nucleotides of the RNA guide comprises a 2′-O-methyl phosphorothioate modification. In some embodiments, each of the first to last, second to last, and third to last nucleotides of the RNA guide comprises a 2′-O-methyl phosphorothioate modification, and wherein the last nucleotide of the RNA guide is unmodified. In some embodiments, each of the first three nucleotides of the RNA guide comprises a 2′-O-methyl phosphorothioate modification, and each of the first to last, second to last, and third to last nucleotides of the RNA guide comprises a 2′-O-methyl phosphorothioate modification.

[0116] When a gene editing system disclosed herein comprises nucleic acids encoding the Cas12i polypeptide disclosed herein, e.g., mRNA molecules, such nucleic acid molecules may contain any of the modifications disclosed herein, where applicable.

[0117] C. Cas12i Polypeptide

[0118] In some embodiments, the composition or system of the present disclosure includes a Cas12i polypeptide as described in WO/2019/178427, the relevant disclosures of which are incorporated by reference for the subject matter and purpose referenced herein.

[0119] In some embodiments, the genetic editing system of the present disclosure comprises a Cas12i2 polypeptide described herein (e.g., a polypeptide comprising SEQ ID NO: 448 and/or encoded by SEQ ID NO: 447 (or a version thereof in which T's are replaced with U's)). In some embodiments, the Cas12i2 polypeptide comprises at least one RuvC domain. In some embodiments, the genetic editing system of the present disclosure comprises a nucleic acid molecule (e.g., a DNA molecule or a polyribonucleotide molecule) encoding a Cas12i polypeptide.

[0120] A nucleic acid sequence encoding the Cas12i2 polypeptide described herein may be substantially identical to a reference nucleic acid sequence, e.g., SEQ ID NO: 447 (or a version thereof in which T's are replaced with U's). In some embodiments, the Cas12i2 polypeptide is encoded by a nucleic acid comprising a sequence having least about 60%, at least about 65%, at least about 70%, at least about 75%, at least about 80%, at least about 85%, at least about 90%, at least about 91%, at least about 92%, at least about 93%, at least about 94%, at least about 95%, at least about 96%, at least about 97%, at least about 98%, at least about 99%, or at least about 99.5% sequence identity to the reference nucleic acid sequence, e.g., SEQ ID NO: 447 (or a version thereof in which T's are replaced with U's). The percent identity between two such nucleic acids can be determined manually by inspection of the two optimally aligned nucleic acid sequences or by using software programs or algorithms (e.g., BLAST, ALIGN, CLUSTAL) using standard parameters. One indication that two nucleic acid sequences are substantially identical is that the nucleic acid molecules hybridize to the complementary sequence of the other under stringent conditions of temperature and ionic strength (e.g., within a range of medium to high stringency). See, e.g., Tijssen, “Hybridization with Nucleic Acid Probes. Part I. Theory and Nucleic Acid Preparation” (Laboratory Techniques in Biochemistry and Molecular Biology, Vol 24).

[0121] In some embodiments, the Cas12i2 polypeptide is encoded by a nucleic acid sequence having at least about 60%, at least about 65%, at least about 70%, at least about 75%, at least about 80%, at least about 85%, at least about 90%, at least about 91%, at least about 92%, at least about 93%, at least about 94%, at least about 95%, at least about 96%, at least about 97%, at least about 98%, at least about 99%, or more sequence identity, but not 100% sequence identity, to a reference nucleic acid sequence, e.g., SEQ ID NO: 447 (or a version thereof in which T's are replaced with U's).

[0122] In some embodiments, the Cas12i2 polypeptide of the present disclosure comprises a polypeptide sequence having at least 50%, 60%, 65%, 70%, 75%, 80%, 85%, 90%, 91%, 92%, 93%, 94%, 95%, 96%, 97%, 98%, 99%, or 100% identity to SEQ ID NO: 448.

[0123] In some embodiments, the present disclosure describes a Cas12i2 polypeptide having a specified degree of amino acid sequence identity to one or more reference polypeptides, e.g., at least 60%, at least 65%, at least 70%, at least 75%, at least 80%, at least 85%, at least 90%, at least 91%, at least 92%, at least 93%, at least 94%, at least 95%, at least 96%, at least 97%, at least 98%, or even at least 99%, but not 100%, sequence identity to the amino acid sequence of SEQ ID NO: 448. Homology or identity can be determined by amino acid sequence alignment, e.g., using a program such as BLAST, ALIGN, or CLUSTAL, as described herein.

[0124] Also provided is a Cas12i2 polypeptide of the present disclosure having enzymatic activity, e.g., nuclease or endonuclease activity, and comprising an amino acid sequence which differs from the amino acid sequences of SEQ ID NO: 448 by 50, 40, 35, 30, 25, 20, 19, 18, 17, 16, 15, 14, 13, 12, 11, 10, 9, 8, 7, 6, 5, 4, 3, 2, 1, or 0 amino acid residue(s), when aligned using any of the previously described alignment methods.

[0125] In some embodiments, the Cas12i2 polypeptide may contain one or more mutations relative to SEQ ID NO: 448, for example, at position D581, G624, F626, P868, 1926, V1030, E1035, 51046, or any combination thereof. In some instances, the one or more mutations are amino acid substitutions, for example, D581R, G624R, F626R, P868T, I926R, V1030G, E1035R, 51046G, or a combination thereof.

[0126] In some embodiments, the Cas12i2 polypeptide comprises a polypeptide having a sequence of SEQ ID NO: 449, SEQ ID NO: 450, SEQ ID NO: 451, SEQ ID NO: 452, or SEQ ID NO: 453. In some examples, the Cas12i2 polypeptide contains mutations at positions D581, D911, 1926, and V1030. Such a Cas12i2 polypeptide may contain amino acid substitutions of D581R, D911R, I926R, and V1030G (e.g., SEQ ID NO: 449). In some examples, the Cas12i2 polypeptide contains mutations at positions D581, 1926, and V1030. Such a Cas12i2 polypeptide may contain amino acid substitutions of D581R, I926R, and V1030G (e.g., SEQ ID NO: 450). In some examples, the Cas12i2 polypeptide may contain mutations at positions D581, 1926, V1030, and 51046. Such a Cas12i2 polypeptide may contain amino acid substitutions of D581R, I926R, V1030G, and 51046G (e.g., SEQ ID NO: 451). In some examples, the Cas12i2 polypeptide may contain mutations at positions D581, G624, F626, 1926, V1030, E1035, and 51046. Such a Cas12i2 polypeptide may contain amino acid substitutions of D581R, G624R, F626R, I926R, V1030G, E1035R, and 51046G (e.g., SEQ ID NO: 452). In some examples, the Cas12i2 polypeptide may contain mutations at positions D581, G624, F626, P868, 1926, V1030, E1035, and 51046. Such a Cas12i2 polypeptide may contain amino acid substitutions of D581R, G624R, F626R, P868T, I926R, V1030G, E1035R, and 51046G (e.g., SEQ ID NO: 453).

[0127] In some embodiments, the Cas12i2 polypeptide of the present disclosure comprises a polypeptide sequence having at least 50%, 60%, 65%, 70%, 75%, 80%, 85%, 90%, 91%, 92%, 93%, 94%, 95%, 96%, 97%, 98%, 99%, or 100% identity to SEQ ID NO: 449, SEQ ID NO: 450, SEQ ID NO: 451, SEQ ID NO: 452, or SEQ ID NO: 453. In some embodiments, a Cas12i2 polypeptide having at least 50%, 60%, 65%, 70%, 75%, 80%, 85%, 90%, 91%, 92%, 93%, 94%, 95%, 96%, 97%, 98%, 99%, or 100% identity to SEQ ID NO: 449, SEQ ID NO: 450, SEQ ID NO: 451, SEQ ID NO: 452, or SEQ ID NO: 453 maintains the amino acid changes (or at least 1, 2, 3 etc. of these changes) that differentiate the polypeptide from its respective parent/reference sequence.

[0128] In some embodiments, the present disclosure describes a Cas12i2 polypeptide having a specified degree of amino acid sequence identity to one or more reference polypeptides, e.g., at least 60%, at least 65%, at least 70%, at least 75%, at least 80%, at least 85%, at least 90%, at least 91%, at least 92%, at least 93%, at least 94%, at least 95%, at least 96%, at least 97%, at least 98%, or even at least 99%, but not 100%, sequence identity to the amino acid sequence of SEQ ID NO: 449, SEQ ID NO: 450, SEQ ID NO: 451, SEQ ID NO: 452, or SEQ ID NO: 453. Homology or identity can be determined by amino acid sequence alignment, e.g., using a program such as BLAST, ALIGN, or CLUSTAL, as described herein.

[0129] Also provided is a Cas12i2 polypeptide of the present disclosure having enzymatic activity, e.g., nuclease or endonuclease activity, and comprising an amino acid sequence which differs from the amino acid sequences of SEQ ID NO: 449, SEQ ID NO: 450, SEQ ID NO: 451, SEQ ID NO: 452, or SEQ ID NO: 453 by 50, 40, 35, 30, 25, 20, 19, 18, 17, 16, 15, 14, 13, 12, 11, 10, 9, 8, 7, 6, 5, 4, 3, 2, 1, or 0 amino acid residue(s), when aligned using any of the previously described alignment methods.

[0130] In some embodiments, the composition of the present disclosure includes a Cas12i4 polypeptide described herein (e.g., a polypeptide comprising SEQ ID NO: 482 and/or encoded by SEQ ID NO: 481 (or a version thereof in which T's are replaced with U's)). In some embodiments, the Cas12i4 polypeptide comprises at least one RuvC domain.

[0131] A nucleic acid sequence encoding the Cas12i4 polypeptide described herein may be substantially identical to a reference nucleic acid sequence, e.g., SEQ ID NO: 481 (or a version thereof in which T's are replaced with U's). In some embodiments, the Cas12i4 polypeptide is encoded by a nucleic acid comprising a sequence having least about 60%, at least about 65%, at least about 70%, at least about 75%, at least about 80%, at least about 85%, at least about 90%, at least about 91%, at least about 92%, at least about 93%, at least about 94%, at least about 95%, at least about 96%, at least about 97%, at least about 98%, at least about 99%, or at least about 99.5% sequence identity to the reference nucleic acid sequence, e.g., SEQ ID NO: 481 (or a version thereof in which T's are replaced with U's). The percent identity between two such nucleic acids can be determined manually by inspection of the two optimally aligned nucleic acid sequences or by using software programs or algorithms (e.g., BLAST, ALIGN, CLUSTAL) using standard parameters. One indication that two nucleic acid sequences are substantially identical is that the nucleic acid molecules hybridize to the complementary sequence of the other under stringent conditions of temperature and ionic strength (e.g., within a range of medium to high stringency).

[0132] In some embodiments, the Cas12i4 polypeptide is encoded by a nucleic acid sequence having at least about 60%, at least about 65%, at least about 70%, at least about 75%, at least about 80%, at least about 85%, at least about 90%, at least about 91%, at least about 92%, at least about 93%, at least about 94%, at least about 95%, at least about 96%, at least about 97%, at least about 98%, at least about 99%, or more sequence identity, but not 100% sequence identity, to a reference nucleic acid sequence, e.g., SEQ ID NO: 481 (or a version thereof in which T's are replaced with U's).

[0133] In some embodiments, the Cas12i4 polypeptide of the present disclosure comprises a polypeptide sequence having at least 50%, 60%, 65%, 70%, 75%, 80%, 85%, 90%, 91%, 92%, 93%, 94%, 95%, 96%, 97%, 98%, 99%, or 100% identity to SEQ ID NO: 482.

[0134] In some embodiments, the present disclosure describes a Cas12i4 polypeptide having a specified degree of amino acid sequence identity to one or more reference polypeptides, e.g., at least 60%, at least 65%, at least 70%, at least 75%, at least 80%, at least 85%, at least 90%, at least 91%, at least 92%, at least 93%, at least 94%, at least 95%, at least 96%, at least 97%, at least 98%, or even at least 99%, but not 100%, sequence identity to the amino acid sequence of SEQ ID NO: 482. Homology or identity can be determined by amino acid sequence alignment, e.g., using a program such as BLAST, ALIGN, or CLUSTAL, as described herein.

[0135] Also provided is a Cas12i4 polypeptide of the present disclosure having enzymatic activity, e.g., nuclease or endonuclease activity, and comprising an amino acid sequence which differs from the amino acid sequences of SEQ ID NO: 482 by 50, 40, 35, 30, 25, 20, 19, 18, 17, 16, 15, 14, 13, 12, 11, 10, 9, 8, 7, 6, 5, 4, 3, 2, 1, or 0 amino acid residue(s), when aligned using any of the previously described alignment methods.

[0136] In some embodiments, the Cas12i4 polypeptide comprises a polypeptide having a sequence of SEQ ID NO: 483 or SEQ ID NO: 484.

[0137] In some embodiments, the Cas12i4 polypeptide of the present disclosure comprises a polypeptide sequence having at least 50%, 60%, 65%, 70%, 75%, 80%, 85%, 90%, 91%, 92%, 93%, 94%, 95%, 96%, 97%, 98%, 99%, or 100% identity to SEQ ID NO: 483 or SEQ ID NO: 484. In some embodiments, a Cas12i4 polypeptide having at least 50%, 60%, 65%, 70%, 75%, 80%, 85%, 90%, 91%, 92%, 93%, 94%, 95%, 96%, 97%, 98%, 99%, or 100% identity to SEQ ID NO: 483 or SEQ ID NO: 484 maintains the amino acid changes (or at least 1, 2, 3 etc. of these changes) that differentiate it from its respective parent/reference sequence.

[0138] In some embodiments, the present disclosure describes a Cas12i4 polypeptide having a specified degree of amino acid sequence identity to one or more reference polypeptides, e.g., at least 60%, at least 65%, at least 70%, at least 75%, at least 80%, at least 85%, at least 90%, at least 91%, at least 92%, at least 93%, at least 94%, at least 95%, at least 96%, at least 97%, at least 98%, or even at least 99%, but not 100%, sequence identity to the amino acid sequence of SEQ ID NO: 483 or SEQ ID NO: 484. Homology or identity can be determined by amino acid sequence alignment, e.g., using a program such as BLAST, ALIGN, or CLUSTAL, as described herein.

[0139] Also provided is a Cas12i4 polypeptide of the present disclosure having enzymatic activity, e.g., nuclease or endonuclease activity, and comprising an amino acid sequence which differs from the amino acid sequences of SEQ ID NO: 483 or SEQ ID NO: 484 by 50, 40, 35, 30, 25, 20, 19, 18, 17, 16, 15, 14, 13, 12, 11, 10, 9, 8, 7, 6, 5, 4, 3, 2, 1, or 0 amino acid residue(s), when aligned using any of the previously described alignment methods.

[0140] In some embodiments, the composition of the present disclosure includes a Cas12i1 polypeptide described herein (e.g., a polypeptide comprising SEQ ID NO: 4503). In some embodiments, the Cas12i1 polypeptide comprises at least one RuvC domain.

[0141] In some embodiments, the Cas12i1 polypeptide of the present disclosure comprises a polypeptide sequence having at least 50%, 60%, 65%, 70%, 75%, 80%, 85%, 90%, 91%, 92%, 93%, 94%, 95%, 96%, 97%, 98%, 99%, or 100% identity to SEQ ID NO: 4503.

[0142] In some embodiments, the present disclosure describes a Cas12i1 polypeptide having a specified degree of amino acid sequence identity to one or more reference polypeptides, e.g., at least 60%, at least 65%, at least 70%, at least 75%, at least 80%, at least 85%, at least 90%, at least 91%, at least 92%, at least 93%, at least 94%, at least 95%, at least 96%, at least 97%, at least 98%, or even at least 99%, but not 100%, sequence identity to the amino acid sequence of SEQ ID NO: 4503. Homology or identity can be determined by amino acid sequence alignment, e.g., using a program such as BLAST, ALIGN, or CLUSTAL, as described herein.

[0143] Also provided is a Cas12i1 polypeptide of the present disclosure having enzymatic activity, e.g., nuclease or endonuclease activity, and comprising an amino acid sequence which differs from the amino acid sequences of SEQ ID NO: 4503 by 50, 40, 35, 30, 25, 20, 19, 18, 17, 16, 15, 14, 13, 12, 11, 10, 9, 8, 7, 6, 5, 4, 3, 2, 1, or 0 amino acid residue(s), when aligned using any of the previously described alignment methods.

[0144] In some embodiments, the composition of the present disclosure includes a Cas12i3 polypeptide described herein (e.g., a polypeptide comprising SEQ ID NO: 4504). In some embodiments, the Cas12i3 polypeptide comprises at least one RuvC domain.

[0145] In some embodiments, the Cas12i3 polypeptide of the present disclosure comprises a polypeptide sequence having at least 50%, 60%, 65%, 70%, 75%, 80%, 85%, 90%, 91%, 92%, 93%, 94%, 95%, 96%, 97%, 98%, 99%, or 100% identity to SEQ ID NO: 4504.

[0146] In some embodiments, the present disclosure describes a Cas12i3 polypeptide having a specified degree of amino acid sequence identity to one or more reference polypeptides, e.g., at least 60%, at least 65%, at least 70%, at least 75%, at least 80%, at least 85%, at least 90%, at least 91%, at least 92%, at least 93%, at least 94%, at least 95%, at least 96%, at least 97%, at least 98%, or even at least 99%, but not 100%, sequence identity to the amino acid sequence of SEQ ID NO: 4504. Homology or identity can be determined by amino acid sequence alignment, e.g., using a program such as BLAST, ALIGN, or CLUSTAL, as described herein.

[0147] Also provided is a Cas12i3 polypeptide of the present disclosure having enzymatic activity, e.g., nuclease or endonuclease activity, and comprising an amino acid sequence which differs from the amino acid sequences of SEQ ID NO: 4504 by 50, 40, 35, 30, 25, 20, 19, 18, 17, 16, 15, 14, 13, 12, 11, 10, 9, 8, 7, 6, 5, 4, 3, 2, 1, or 0 amino acid residue(s), when aligned using any of the previously described alignment methods.

[0148] Although the changes described herein may be one or more amino acid changes, changes to the Cas12i polypeptide may also be of a substantive nature, such as fusion of polypeptides as amino- and/or carboxyl-terminal extensions. For example, the Cas12i polypeptide may contain additional peptides, e.g., one or more peptides. Examples of additional peptides may include epitope peptides for labelling, such as a polyhistidine tag (His-tag), Myc, and FLAG. In some embodiments, the Cas12i polypeptide described herein can be fused to a detectable moiety such as a fluorescent protein (e.g., green fluorescent protein (GFP) or yellow fluorescent protein (YFP)).

[0149] In some embodiments, the Cas12i polypeptide comprises at least one (e.g., two, three, four, five, six, or more) nuclear localization signal (NLS). In some embodiments, the Cas12i polypeptide comprises at least one (e.g., two, three, four, five, six, or more) nuclear export signal (NES). In some embodiments, the Cas12i polypeptide comprises at least one (e.g., two, three, four, five, six, or more) NLS and at least one (e.g., two, three, four, five, six, or more) NES.

[0150] In some embodiments, the Cas12i polypeptide described herein can be self-inactivating. See, Epstein et al., “Engineering a Self-Inactivating CRISPR System for AAV Vectors,” Mol. Ther., 24 (2016): S50, which is incorporated by reference in its entirety.

[0151] In some embodiments, the nucleotide sequence encoding the Cas12i polypeptide described herein can be codon-optimized for use in a particular host cell or organism. For example, the nucleic acid can be codon-optimized for any non-human eukaryote including mice, rats, rabbits, dogs, livestock, or non-human primates. Codon usage tables are readily available, for example, at the “Codon Usage Database” available at the world wide web site of kazusa.orjp/codon/ and these tables can be adapted in a number of ways. See Nakamura et al. Nucl. Acids Res. 28:292 (2000), which is incorporated herein by reference in its entirety. Computer algorithms for codon optimizing a particular sequence for expression in a particular host cell are also available, such as Gene Forge (Aptagen; Jacobus, PA). In some examples, the nucleic acid encoding the Cas12i polypeptides such as Cas12i2 polypeptides as disclosed herein can be an mRNA molecule, which can be codon optimized.

[0152] Exemplary Cas12i polypeptide sequences and corresponding nucleotide sequences are listed in Table 7.

TABLE 7
Cas12i and STMN2 Sequences

| SEQ | | |
|---|---|---|
| ID NO: | Sequence | Description |
| 447 | ATGAGCAGCGCGATCAAAAGCTACAAGAGCGTTCTGCGTCCGAAC | Nucleotide |
| | GAGCGTAAGAACCAACTGCTGAAAAGCACCATTCAGTGCCTGGAA | sequence |
| | GACGGTAGCGCGTTCTTTTTCAAGATGCTGCAAGGCCTGTTTGGT | encoding |
| | GGCATCACCCCGGAGATTGTTCGTTTCAGCACCGAACAGGAGAAA | Cas12i2 |
| | CAGCAACAGGATATCGCGCTGTGGTGCGCGGTTAACTGGTTCCGT | |
| | CCGGTGAGCCAAGACAGCCTGACCCACACCATTGCGAGCGATAAC | |
| | CTGGTGGAGAAGTTTGAGGAATACTATGGTGGCACCGCGAGCGAC | |
| | GCGATCAAACAGTACTTCAGCGCGAGCATTGGCGAAAGCTACTAT | |
| | TGGAACGACTGCCGTCAACAGTACTATGATCTGTGCCGTGAGCTG | |
| | GGTGTTGAGGTGAGCGACCTGACCCATGATCTGGAGATCCTGTGC | |
| | CGTGAAAAGTGCCTGGCGGTTGCGACCGAGAGCAACCAGAACAAC | |
| | AGCATCATTAGCGTTCTGTTTGGCACCGGCGAAAAAGAGGACCGT | |
| | AGCGTGAAACTGCGTATCACCAAGAAAATTCTGGAGGCGATCAGC | |
| | AACCTGAAAGAAATCCCGAAGAACGTTGCGCCGATTCAAGAGATC | |
| | ATTCTGAACGTGGCGAAAGCGACCAAGGAAACCTTCCGTCAGGTG | |
| | TATGCGGGTAACCTGGGTGCGCCGAGCACCCTGGAGAAATTTATC | |
| | GCGAAGGACGGCCAAAAAGAGTTCGATCTGAAGAAACTGCAGACC | |
| | GACCTGAAGAAAGTTATTCGTGGTAAAAGCAAGGAGCGTGATTGG | |
| | TGCTGCCAGGAAGAGCTGCGTAGCTACGTGGAGCAAAACACCATC | |
| | CAGTATGACCTGTGGGCGTGGGGCGAAATGTTCAACAAAGCGCAC | |
| | ACCGCGCTGAAAATCAAGAGCACCCGTAACTACAACTTTGCGAAG | |
| | CAACGTCTGGAACAGTTCAAAGAGATTCAGAGCCTGAACAACCTG | |
| | CTGGTTGTGAAGAAGCTGAACGACTTTTTCGATAGCGAATTTTTC | |
| | AGCGGCGAGGAAACCTACACCATCTGCGTTCACCATCTGGGTGGC | |
| | AAGGACCTGAGCAAACTGTATAAGGCGTGGGAGGATGATCCGGCG | |
| | GACCCGGAAAACGCGATTGTGGTTCTGTGCGACGATCTGAAAAAC | |
| | AACTTTAAGAAAGAGCCGATCCGTAACATTCTGCGTTACATCTTC | |
| | ACCATTCGTCAAGAATGCAGCGCGCAGGACATCCTGGCGGCGGCG | |
| | AAGTACAACCAACAGCTGGATCGTTATAAAAGCCAAAAGGCGAAC | |
| | CCGAGCGTTCTGGGTAACCAGGGCTTTACCTGGACCAACGCGGTG | |
| | ATCCTGCCGGAGAAGGCGCAGCGTAACGACCGTCCGAACAGCCTG | |
| | GATCTGCGTATTTGGCTGTACCTGAAACTGCGTCACCCGGACGGT | |
| | CGTTGGAAGAAACACCATATCCCGTTCTACGATACCCGTTTCTTC | |
| | CAAGAAATTTATGCGGCGGGCAACAGCCCGGTTGACACCTGCCAG | |
| | TTTCGTACCCCGCGTTTCGGTTATCACCTGCCGAAACTGACCGAT | |
| | CAGACCGCGATCCGTGTTAACAAGAAACATGTGAAAGCGGCGAAG | |
| | ACCGAGGCGCGTATTCGTCTGGCGATCCAACAGGGCACCCTGCCG | |
| | GTGAGCAACCTGAAGATCACCGAAATTAGCGCGACCATCAACAGC | |
| | AAAGGTCAAGTGCGTATTCCGGTTAAGTTTGACGTGGGTCGTCAA | |
| | AAAGGCACCCTGCAGATCGGTGACCGTTTCTGCGGCTACGATCAA | |
| | AACCAGACCGCGAGCCACGCGTATAGCCTGTGGGAAGTGGTTAAA | |
| | GAGGGTCAATACCATAAAGAGCTGGGCTGCTTTGTTCGTTTCATC | |
| | AGCAGCGGTGACATCGTGAGCATTACCGAGAACCGTGGCAACCAA | |
| | TTTGATCAGCTGAGCTATGAAGGTCTGGCGTACCCGCAATATGCG | |
| | GACTGGCGTAAGAAAGCGAGCAAGTTCGTGAGCCTGTGGCAGATC | |
| | ACCAAGAAAAACAAGAAAAAGGAAATCGTGACCGTTGAAGCGAAA | |
| | GAGAAGTTTGACGCGATCTGCAAGTACCAGCCGCGTCTGTATAAA | |
| | TTCAACAAGGAGTACGCGTATCTGCTGCGTGATATTGTTCGTGGC | |
| | AAAAGCCTGGTGGAACTGCAACAGATTCGTCAAGAGATCTTTCGT | |
| | TTCATTGAACAGGACTGCGGTGTTACCCGTCTGGGCAGCCTGAGC | |
| | CTGAGCACCCTGGAAACCGTGAAAGCGGTTAAGGGTATCATTTAC | |
| | AGCTATTTTAGCACCGCGCTGAACGCGAGCAAGAACAACCCGATC | |
| | AGCGACGAACAGCGTAAAGAGTTTGATCCGGAACTGTTCGCGCTG | |
| | CTGGAAAAGCTGGAGCTGATTCGTACCCGTAAAAAGAAACAAAAA | |
| | GTGGAACGTATCGCGAACAGCCTGATTCAGACCTGCCTGGAGAAC | |
| | AACATCAAGTTCATTCGTGGTGAAGGCGACCTGAGCACCACCAAC | |
| | AACGCGACCAAGAAAAAGGCGAACAGCCGTAGCATGGATTGGTTG | |
| | GCGCGTGGTGTTTTTAACAAAATCCGTCAACTGGCGCCGATGCAC | |
| | AACATTACCCTGTTCGGTTGCGGCAGCCTGTACACCAGCCACCAG | |
| | GACCCGCTGGTGCATCGTAACCCGGATAAAGCGATGAAGTGCCGT | |
| | TGGGCGGCGATCCCGGTTAAGGACATTGGCGATTGGGTGCTGCGT | |
| | AAGCTGAGCCAAAACCTGCGTGCGAAAAACATCGGCACCGGCGAG | |
| | TACTATCACCAAGGTGTTAAAGAGTTCCTGAGCCATTATGAACTG | |
| | CAGGACCTGGAGGAAGAGCTGCTGAAGTGGCGTAGCGATCGTAAA | |
| | AGCAACATTCCGTGCTGGGTGCTGCAGAACCGTCTGGCGGAGAAG | |
| | CTGGGCAACAAAGAAGCGGTGGTTTACATCCCGGTTCGTGGTGGC | |
| | CGTATTTATTTTGCGACCCACAAGGTGGCGACCGGTGCGGTGAGC | |
| | ATCGTTTTCGACCAAAAACAAGTGTGGGTTTGCAACGCGGATCAT | |
| | GTTGCGGCGGCGAACATCGCGCTGACCGTGAAGGGTATTGGCGAA | |
| | CAAAGCAGCGACGAAGAGAACCCGGATGGTAGCCGTATCAAACTG | |
| | CAGCTGACCAGC | |
| 448 | MSSAIKSYKSVLRPNERKNQLLKSTIQCLEDGSAFFFKMLQGLFG | Cas12i2 |
| | GITPEIVRFSTEQEKQQQDIALWCAVNWFRPVSQDSLTHTIASDN | amino |
| | LVEKFEEYYGGTASDAIKQYFSASIGESYYWNDCRQQYYDLCREL | acid |
| | GVEVSDLTHDLEILCREKCLAVATESNQNNSIISVLFGTGEKEDR | sequence |
| | SVKLRITKKILEAISNLKEIPKNVAPIQEIILNVAKATKETFRQV | |
| | YAGNLGAPSTLEKFIAKDGQKEFDLKKLQTDLKKVIRGKSKERDW | |
| | CCQEELRSYVEQNTIQYDLWAWGEMFNKAHTALKIKSTRNYNFAK | |
| | QRLEQFKEIQSLNNLLVVKKLNDFFDSEFFSGEETYTICVHHLGG | |
| | KDLSKLYKAWEDDPADPENAIVVLCDDLKNNFKKEPIRNILRYIF | |
| | TIRQECSAQDILAAAKYNQQLDRYKSQKANPSVLGNQGFTWTNAV | |
| | ILPEKAQRNDRPNSLDLRIWLYLKLRHPDGRWKKHHIPFYDTRFF | |
| | QEIYAAGNSPVDTCQFRTPRFGYHLPKLTDQTAIRVNKKHVKAAK | |
| | TEARIRLAIQQGTLPVSNLKITEISATINSKGQVRIPVKFDVGRQ | |
| | KGTLQIGDRFCGYDQNQTASHAYSLWEVVKEGQYHKELGCFVRFI | |
| | SSGDIVSITENRGNQFDQLSYEGLAYPQYADWRKKASKFVSLWQI | |
| | TKKNKKKEIVTVEAKEKFDAICKYQPRLYKFNKEYAYLLRDIVRG | |
| | KSLVELQQIRQEIFRFIEQDCGVTRLGSLSLSTLETVKAVKGIIY | |
| | SYFSTALNASKNNPISDEQRKEFDPELFALLEKLELIRTRKKKQK | |
| | VERIANSLIQTCLENNIKFIRGEGDLSTTNNATKKKANSRSMDWL | |
| | ARGVFNKIRQLAPMHNITLFGCGSLYTSHQDPLVHRNPDKAMKCR | |
| | WAAIPVKDIGDWVLRKLSQNLRAKNIGTGEYYHQGVKEFLSHYEL | |
| | QDLEEELLKWRSDRKSNIPCWVLQNRLAEKLGNKEAVVYIPVRGG | |
| | RIYFATHKVATGAVSIVFDQKQVWVCNADHVAAANIALTVKGIGE | |
| | QSSDEENPDGSRIKLQLTS | |
| 449 | MSSAIKSYKS VLRPNERKNQ LLKSTIQCLE DGSAFFFKML | Variant |
| | QGLFGGITPE IVRFSTEQEK QQQDIALWCA VNWFRPVSQD | Cas12i2 of |
| | SLTHTIASDN LVEKFEEYYG GTASDAIKQY FSASIGESYY | SEQ ID NO: |
| | WNDCRQQYYD LCRELGVEVS DLTHDLEILC REKCLAVATE | 3 of |
| | SNQNNSIISV LFGTGEKEDR SVKLRITKKI LEAISNLKEI | PCT/US2021/ |
| | PKNVAPIQEI ILNVAKATKE TFRQVYAGNL GAPSTLEKFI | 025257 |
| | AKDGQKEFDL KKLQTDLKKV IRGKSKERDW CCQEELRSYV | |
| | EQNTIQYDLW AWGEMFNKAH TALKIKSTRN YNFAKQRLEQ | |
| | FKEIQSLNNL LVVKKLNDFF DSEFFSGEET YTICVHHLGG | |
| | KDLSKLYKAW EDDPADPENA IVVLCDDLKN NFKKEPIRNI | |
| | LRYIFTIRQE CSAQDILAAA KYNQQLDRYK SQKANPSVLG | |
| | NQGFTWTNAV ILPEKAQRND RPNSLDLRIW LYLKLRHPDG | |
| | RWKKHHIPFY DTRFFQEIYA AGNSPVDTCQ FRTPRFGYHL | |
| | PKLTDQTAIR VNKKHVKAAK TEARIRLAIQ QGTLPVSNLK | |
| | ITEISATINS KGQVRIPVKF RVGRQKGTLQ IGDRFCGYDQ | |
| | NQTASHAYSL WEVVKEGQYH KELGCFVRFI SSGDIVSITE | |
| | NRGNQFDQLS YEGLAYPQYA DWRKKASKFV SLWQITKKNK | |
| | KKEIVTVEAK EKFDAICKYQ PRLYKFNKEY AYLLRDIVRG | |
| | KSLVELQQIR QEIFRFIEQD CGVTRLGSLS LSTLETVKAV | |
| | KGIIYSYFST ALNASKNNPI SDEQRKEFDP ELFALLEKLE | |
| | LIRTRKKKQK VERIANSLIQ TCLENNIKFI RGEGDLSTTN | |
| | NATKKKANSR SMDWLARGVF NKIRQLAPMH NITLFGCGSL | |
| | YTSHQDPLVH RNPDKAMKCR WAAIPVKDIG RWVLRKLSQN | |
| | LRAKNRGTGE YYHQGVKEFL SHYELQDLEE ELLKWRSDRK | |
| | SNIPCWVLQN RLAEKLGNKE AVVYIPVRGG RIYFATHKVA | |
| | TGAVSIVFDQ KQVWVCNADH VAAANIALTG KGIGEQSSDE | |
| | ENPDGSRIKL QLTS | |
| 450 | MSSAIKSYKS VLRPNERKNQ LLKSTIQCLE DGSAFFFKML | Variant |
| | QGLFGGITPE IVRFSTEQEK QQQDIALWCA VNWFRPVSQD | Cas12i2 of |
| | SLTHTIASDN LVEKFEEYYG GTASDAIKQY FSASIGESYY | SEQ ID NO: |
| | WNDCRQQYYD LCRELGVEVS DLTHDLEILC REKCLAVATE | 4 of |
| | SNQNNSIISV LFGTGEKEDR SVKLRITKKI LEAISNLKEI | PCT/US2021/ |
| | PKNVAPIQEI ILNVAKATKE TFRQVYAGNL GAPSTLEKFI | 025257 |
| | AKDGQKEFDL KKLQTDLKKV IRGKSKERDW CCQEELRSYV | |
| | EQNTIQYDLW AWGEMFNKAH TALKIKSTRN YNFAKQRLEQ | |
| | FKEIQSLNNL LVVKKLNDFF DSEFFSGEET YTICVHHLGG | |
| | KDLSKLYKAW EDDPADPENA IVVLCDDLKN NFKKEPIRNI | |
| | LRYIFTIRQE CSAQDILAAA KYNQQLDRYK SQKANPSVLG | |
| | NQGFTWTNAV ILPEKAQRND RPNSLDLRIW LYLKLRHPDG | |
| | RWKKHHIPFY DTRFFQEIYA AGNSPVDTCQ FRTPRFGYHL | |
| | PKLTDQTAIR VNKKHVKAAK TEARIRLAIQ QGTLPVSNLK | |
| | ITEISATINS KGQVRIPVKF RVGRQKGTLQ IGDRFCGYDQ | |
| | NQTASHAYSL WEVVKEGQYH KELGCFVRFI SSGDIVSITE | |
| | NRGNQFDQLS YEGLAYPQYA DWRKKASKFV SLWQITKKNK | |
| | KKEIVTVEAK EKFDAICKYQ PRLYKFNKEY AYLLRDIVRG | |
| | KSLVELQQIR QEIFRFIEQD CGVTRLGSLS LSTLETVKAV | |
| | KGIIYSYFST ALNASKNNPI SDEQRKEFDP ELFALLEKLE | |
| | LIRTRKKKQK VERIANSLIQ TCLENNIKFI RGEGDLSTTN | |
| | NATKKKANSR SMDWLARGVF NKIRQLAPMH NITLFGCGSL | |
| | YTSHQDPLVH RNPDKAMKCR WAAIPVKDIG DWVLRKLSQN | |
| | LRAKNRGTGE YYHQGVKEFL SHYELQDLEE ELLKWRSDRK | |
| | SNIPCWVLQN RLAEKLGNKE AVVYIPVRGG RIYFATHKVA | |
| | TGAVSIVFDQ KQVWVCNADH VAAANIALTG KGIGEQSSDE | |
| | ENPDGSRIKL QLTS | |
| 451 | MSSAIKSYKS VLRPNERKNQ LLKSTIQCLE DGSAFFFKML | Variant |
| | QGLFGGITPE IVRFSTEQEK QQQDIALWCA VNWFRPVSQD | Cas12i2 of |
| | SLTHTIASDN LVEKFEEYYG GTASDAIKQY FSASIGESYY | SEQ ID NO: |
| | WNDCRQQYYD LCRELGVEVS DLTHDLEILC REKCLAVATE | 5 of |
| | SNQNNSIISV LFGTGEKEDR SVKLRITKKI LEAISNLKEI | PCT/US2021/ |
| | PKNVAPIQEI ILNVAKATKE TFRQVYAGNL GAPSTLEKFI | 025257 |
| | AKDGQKEFDL KKLQTDLKKV IRGKSKERDW CCQEELRSYV | |
| | EQNTIQYDLW AWGEMFNKAH TALKIKSTRN YNFAKQRLEQ | |
| | FKEIQSLNNL LVVKKLNDFF DSEFFSGEET YTICVHHLGG | |
| | KDLSKLYKAW EDDPADPENA IVVLCDDLKN NFKKEPIRNI | |
| | LRYIFTIRQE CSAQDILAAA KYNQQLDRYK SQKANPSVLG | |
| | NQGFTWTNAV ILPEKAQRND RPNSLDLRIW LYLKLRHPDG | |
| | RWKKHHIPFY DTRFFQEIYA AGNSPVDTCQ FRTPRFGYHL | |
| | PKLTDQTAIR VNKKHVKAAK TEARIRLAIQ QGTLPVSNLK | |
| | ITEISATINS KGQVRIPVKF RVGRQKGTLQ IGDRFCGYDQ | |
| | NQTASHAYSL WEVVKEGQYH KELGCFVRFI SSGDIVSITE | |
| | NRGNQFDQLS YEGLAYPQYA DWRKKASKFV SLWQITKKNK | |
| | KKEIVTVEAK EKFDAICKYQ PRLYKFNKEY AYLLRDIVRG | |
| | KSLVELQQIR QEIFRFIEQD CGVTRLGSLS LSTLETVKAV | |
| | KGIIYSYFST ALNASKNNPI SDEQRKEFDP ELFALLEKLE | |
| | LIRTRKKKQK VERIANSLIQ TCLENNIKFI RGEGDLSTTN | |
| | NATKKKANSR SMDWLARGVF NKIRQLAPMH NITLFGCGSL | |
| | YTSHQDPLVH RNPDKAMKCR WAAIPVKDIG DWVLRKLSQN | |
| | LRAKNRGTGE YYHQGVKEFL SHYELQDLEE ELLKWRSDRK | |
| | SNIPCWVLQN RLAEKLGNKE AVVYIPVRGG RIYFATHKVA | |
| | TGAVSIVFDQ KQVWVCNADH VAAANIALTG KGIGEQSSDE | |
| | ENPDGGRIKL QLTS | |
| 452 | MSSAIKSYKS VLRPNERKNQ LLKSTIQCLE DGSAFFFKML | Variant |
| | QGLFGGITPE IVRFSTEQEK QQQDIALWCA VNWFRPVSQD | Cas12i2 of |
| | SLTHTIASDN LVEKFEEYYG GTASDAIKQY FSASIGESYY | SEQ ID NO: |
| | WNDCRQQYYD LCRELGVEVS DLTHDLEILC REKCLAVATE | 495 of |
| | SNQNNSIISV LFGTGEKEDR SVKLRITKKI LEAISNLKEI | PCT/US2021/ |
| | PKNVAPIQEI ILNVAKATKE TFRQVYAGNL GAPSTLEKFI | 025257 |
| | AKDGQKEFDL KKLQTDLKKV IRGKSKERDW CCQEELRSYV | |
| | EQNTIQYDLW AWGEMFNKAH TALKIKSTRN YNFAKQRLEQ | |
| | FKEIQSLNNL LVVKKLNDFF DSEFFSGEET YTICVHHLGG | |
| | KDLSKLYKAW EDDPADPENA IVVLCDDLKN NFKKEPIRNI | |
| | LRYIFTIRQE CSAQDILAAA KYNQQLDRYK SQKANPSVLG | |
| | NQGFTWTNAV ILPEKAQRND RPNSLDLRIW LYLKLRHPDG | |
| | RWKKHHIPFY DTRFFQEIYA AGNSPVDTCQ FRTPRFGYHL | |
| | PKLTDQTAIR VNKKHVKAAK TEARIRLAIQ QGTLPVSNLK | |
| | ITEISATINS KGQVRIPVKF RVGRQKGTLQ IGDRFCGYDQ | |
| | NQTASHAYSL WEVVKEGQYH KELRCRVRFI SSGDIVSITE | |
| | NRGNQFDQLS YEGLAYPQYA DWRKKASKFV SLWQITKKNK | |
| | KKEIVTVEAK EKFDAICKYQ PRLYKFNKEY AYLLRDIVRG | |
| | KSLVELQQIR QEIFRFIEQD CGVTRLGSLS LSTLETVKAV | |
| | KGIIYSYFST ALNASKNNPI SDEQRKEFDP ELFALLEKLE | |
| | LIRTRKKKQK VERIANSLIQ TCLENNIKFI RGEGDLSTTN | |
| | NATKKKANSR SMDWLARGVF NKIRQLAPMH NITLFGCGSL | |
| | YTSHQDPLVH RNPDKAMKCR WAAIPVKDIG DWVLRKLSQN | |
| | LRAKNRGTGE YYHQGVKEFL SHYELQDLEE ELLKWRSDRK | |
| | SNIPCWVLQN RLAEKLGNKE AVVYIPVRGG RIYFATHKVA | |
| | TGAVSIVFDQ KQVWVCNADH VAAANIALTG KGIGRQSSDE | |
| | ENPDGGRIKL QLTS | |
| 453 | MSSAIKSYKS VLRPNERKNQ LLKSTIQCLE DGSAFFFKML | Variant |
| | QGLFGGITPE IVRFSTEQEK QQQDIALWCA VNWFRPVSQD | Cas12i2 of |
| | SLTHTIASDN LVEKFEEYYG GTASDAIKQY FSASIGESYY | SEQ ID NO: |
| | WNDCRQQYYD LCRELGVEVS DLTHDLEILC REKCLAVATE | 496 of |
| | SNQNNSIISV LFGTGEKEDR SVKLRITKKI LEAISNLKEI | PCT/US2021/ |
| | PKNVAPIQEI ILNVAKATKE TFRQVYAGNL GAPSTLEKFI | 025257 |
| | AKDGQKEFDL KKLQTDLKKV IRGKSKERDW CCQEELRSYV | |
| | EQNTIQYDLW AWGEMFNKAH TALKIKSTRN YNFAKQRLEQ | |
| | FKEIQSLNNL LVVKKLNDFF DSEFFSGEET YTICVHHLGG | |
| | KDLSKLYKAW EDDPADPENA IVVLCDDLKN NFKKEPIRNI | |
| | LRYIFTIRQE CSAQDILAAA KYNQQLDRYK SQKANPSVLG | |
| | NQGFTWTNAV ILPEKAQRND RPNSLDLRIW LYLKLRHPDG | |
| | RWKKHHIPFY DTRFFQEIYA AGNSPVDTCQ FRTPRFGYHL | |
| | PKLTDQTAIR VNKKHVKAAK TEARIRLAIQ QGTLPVSNLK | |
| | ITEISATINS KGQVRIPVKF RVGRQKGTLQ IGDRFCGYDQ | |
| | NQTASHAYSL WEVVKEGQYH KELRCRVRFI SSGDIVSITE | |
| | NRGNQFDQLS YEGLAYPQYA DWRKKASKFV SLWQITKKNK | |
| | KKEIVTVEAK EKFDAICKYQ PRLYKFNKEY AYLLRDIVRG | |
| | KSLVELQQIR QEIFRFIEQD CGVTRLGSLS LSTLETVKAV | |
| | KGIIYSYFST ALNASKNNPI SDEQRKEFDP ELFALLEKLE | |
| | LIRTRKKKQK VERIANSLIQ TCLENNIKFI RGEGDLSTTN | |
| | NATKKKANSR SMDWLARGVF NKIRQLATMH NITLFGCGSL | |
| | YTSHQDPLVH RNPDKAMKCR WAAIPVKDIG DWVLRKLSQN | |
| | LRAKNRGTGE YYHQGVKEFL SHYELQDLEE ELLKWRSDRK | |
| | SNIPCWVLQN RLAEKLGNKE AVVYIPVRGG RIYFATHKVA | |
| | TGAVSIVFDQ KQVWVCNADH VAAANIALTG KGIGRQSSDE | |
| | ENPDGGRIKL QLTS | |
| 481 | ATGGCTTCCATCTCTAGGCCATACGGCACCAAGCTGCGACCGGAC | Nucleotide |
| | GCACGGAAGAAGGAGATGCTCGATAAGTTCTTTAATACACTGACT | sequence |
| | AAGGGTCAGCGCGTGTTCGCAGACCTGGCCCTGTGCATCTATGGC | encoding |
| | TCCCTGACCCTGGAGATGGCCAAGTCTCTGGAGCCAGAAAGTGAT | Cas12i4 |
| | TCAGAACTGGTGTGCGCTATTGGGTGGTTTCGGCTGGTGGACAAG | |
| | ACCATCTGGTCCAAGGATGGCATCAAGCAGGAGAATCTGGTGAAA | |
| | CAGTACGAAGCCTATTCCGGAAAGGAGGCTTCTGAAGTGGTCAAA | |
| | ACATACCTGAACAGCCCCAGCTCCGACAAGTACGTGTGGATCGAT | |
| | TGCAGGCAGAAATTCCTGAGGTTTCAGCGCGAGCTCGGCACTCGC | |
| | AACCTGTCCGAGGACTTCGAATGTATGCTCTTTGAACAGTACATT | |
| | AGACTGACCAAGGGCGAGATCGAAGGGTATGCCGCTATTTCAAAT | |
| | ATGTTCGGAAACGGCGAGAAGGAAGACCGGAGCAAGAAAAGAATG | |
| | TACGCTACACGGATGAAAGATTGGCTGGAGGCAAACGAAAATATC | |
| | ACTTGGGAGCAGTATAGAGAGGCCCTGAAGAACCAGCTGAATGCT | |
| | AAAAACCTGGAGCAGGTTGTGGCCAATTACAAGGGGAACGCTGGC | |
| | GGGGCAGACCCCTTCTTTAAGTATAGCTTCTCCAAAGAGGGAATG | |
| | GTGAGCAAGAAAGAACATGCACAGCAGCTCGACAAGTTCAAAACC | |
| | GTCCTGAAGAACAAAGCCCGGGACCTGAATTTTCCAAACAAGGAG | |
| | AAGCTGAAGCAGTACCTGGAGGCCGAAATCGGCATTCCGGTCGAC | |
| | GCTAACGTGTACTCCCAGATGTTCTCTAACGGGGTGAGTGAGGTC | |
| | CAGCCTAAGACCACACGGAATATGTCTTTTAGTAACGAGAAACTG | |
| | GATCTGCTCACTGAACTGAAGGACCTGAACAAGGGCGATGGGTTC | |
| | GAGTACGCCAGAGAAGTGCTGAACGGGTTCTTTGACTCCGAGCTC | |
| | CACACTACCGAGGATAAGTTTAATATCACCTCTAGGTACCTGGGA | |
| | GGCGACAAATCAAACCGCCTGAGCAAACTCTATAAGATCTGGAAG | |
| | AAAGAGGGTGTGGACTGCGAGGAAGGCATTCAGCAGTTCTGTGAA | |
| | GCCGTCAAAGATAAGATGGGCCAGATCCCCATTCGAAATGTGCTG | |
| | AAGTACCTGTGGCAGTTCCGGGAGACAGTCAGTGCCGAGGATTTT | |
| | GAAGCAGCCGCTAAGGCTAACCATCTGGAGGAAAAGATCAGCCGG | |
| | GTGAAAGCCCACCCAATCGTGATTAGCAATAGGTACTGGGCTTTT | |
| | GGGACTTCCGCACTGGTGGGAAACATTATGCCCGCAGACAAGAGG | |
| | CATCAGGGAGAGTATGCCGGTCAGAATTTCAAAATGTGGCTGGAG | |
| | GCTGAACTGCACTACGATGGCAAGAAAGCAAAGCACCATCTGCCT | |
| | TTTTATAACGCCCGCTTCTTTGAGGAAGTGTACTGCTATCACCCC | |
| | TCTGTCGCCGAGATCACTCCTTTCAAAACCAAGCAGTTTGGCTGT | |
| | GAAATCGGGAAGGACATTCCAGATTACGTGAGCGTCGCTCTGAAG | |
| | GACAATCCGTATAAGAAAGCAACCAAACGAATCCTGCGTGCAATC | |
| | TACAATCCCGTCGCCAACACAACTGGCGTTGATAAGACCACAAAC | |
| | TGCAGCTTCATGATCAAACGCGAGAATGACGAATATAAGCTGGTC | |
| | ATCAACCGAAAAATTTCCGTGGATCGGCCTAAGAGAATCGAAGTG | |
| | GGCAGGACAATTATGGGGTACGACCGCAATCAGACAGCTAGCGAT | |
| | ACTTATTGGATTGGCCGGCTGGTGCCACCTGGAACCCGGGGCGCA | |
| | TACCGCATCGGAGAGTGGAGCGTCCAGTATATTAAGTCCGGGCCT | |
| | GTCCTGTCTAGTACTCAGGGAGTTAACAATTCCACTACCGACCAG | |
| | CTGGTGTACAACGGCATGCCATCAAGCTCCGAGCGGTTCAAGGCC | |
| | TGGAAGAAAGCCAGAATGGCTTTTATCCGAAAACTCATTCGTCAG | |
| | CTGAATGACGAGGGACTGGAATCTAAGGGTCAGGATTATATCCCC | |
| | GAGAACCCTTCTAGTTTCGATGTGCGGGGCGAAACCCTGTACGTC | |
| | TTTAACAGTAATTATCTGAAGGCCCTGGTGAGCAAACACAGAAAG | |
| | GCCAAGAAACCTGTTGAGGGGATCCTGGACGAGATTGAAGCCTGG | |
| | ACATCTAAAGACAAGGATTCATGCAGCCTGATGCGGCTGAGCAGC | |
| | CTGAGCGATGCTTCCATGCAGGGAATCGCCAGCCTGAAGAGTCTG | |
| | ATTAACAGCTACTTCAACAAGAATGGCTGTAAAACCATCGAGGAC | |
| | AAAGAAAAGTTTAATCCCGTGCTGTATGCCAAGCTGGTTGAGGTG | |
| | GAACAGCGGAGAACAAACAAGCGGTCTGAGAAAGTGGGAAGAATC | |
| | GCAGGTAGTCTGGAGCAGCTGGCCCTGCTGAACGGGGTTGAGGTG | |
| | GTCATCGGCGAAGCTGACCTGGGGGAGGTCGAAAAAGGAAAGAGT | |
| | AAGAAACAGAATTCACGGAACATGGATTGGTGCGCAAAGCAGGTG | |
| | GCACAGCGGCTGGAGTACAAACTGGCCTTCCATGGAATCGGTTAC | |
| | TTTGGAGTGAACCCCATGTATACCAGCCACCAGGACCCTTTCGAA | |
| | CATAGGCGCGTGGCTGATCACATCGTCATGCGAGCACGTTTTGAG | |
| | GAAGTCAACGTGGAGAACATTGCCGAATGGCACGTGCGAAATTTC | |
| | TCAAACTACCTGCGTGCAGACAGCGGCACTGGGCTGTACTATAAG | |
| | CAGGCCACCATGGACTTCCTGAAACATTACGGTCTGGAGGAACAC | |
| | GCTGAGGGCCTGGAAAATAAGAAAATCAAGTTCTATGACTTTAGA | |
| | AAGATCCTGGAGGATAAAAACCTGACAAGCGTGATCATTCCAAAG | |
| | AGGGGCGGGCGCATCTACATGGCCACCAACCCAGTGACATCCGAC | |
| | TCTACCCCGATTACATACGCCGGCAAGACTTATAATAGGTGTAAC | |
| | GCTGATGAGGTGGCAGCCGCTAATATCGTTATTTCTGTGCTGGCT | |
| | CCCCGCAGTAAGAAAAACGAGGAACAGGACGATATCCCTCTGATT | |
| | ACCAAGAAAGCCGAGAGTAAGTCACCACCGAAAGACCGGAAGAGA | |
| | TCAAAAACAAGCCAGCTGCCTCAGAAA | |
| 482 | MASISRPYGTKLRPDARKKEMLDKFFNTLTKGQRVFADLALCIYG | Cas12i4 |
| | SLTLEMAKSLEPESDSELVCAIGWFRLVDKTIWSKDGIKQENLVK | amino |
| | QYEAYSGKEASEVVKTYLNSPSSDKYVWIDCRQKFLRFQRELGTR | acid |
| | NLSEDFECMLFEQYIRLTKGEIEGYAAISNMFGNGEKEDRSKKRM | sequence |
| | YATRMKDWLEANENITWEQYREALKNQLNAKNLEQVVANYKGNAG | |
| | GADPFFKYSFSKEGMVSKKEHAQQLDKFKTVLKNKARDLNFPNKE | |
| | KLKQYLEAEIGIPVDANVYSQMFSNGVSEVQPKTTRNMSFSNEKL | |
| | DLLTELKDLNKGDGFEYAREVLNGFFDSELHTTEDKFNITSRYLG | |
| | GDKSNRLSKLYKIWKKEGVDCEEGIQQFCEAVKDKMGQIPIRNVL | |
| | KYLWQFRETVSAEDFEAAAKANHLEEKISRVKAHPIVISNRYWAF | |
| | GTSALVGNIMPADKRHQGEYAGQNFKMWLEAELHYDGKKAKHHLP | |
| | FYNARFFEEVYCYHPSVAEITPFKTKQFGCEIGKDIPDYVSVALK | |
| | DNPYKKATKRILRAIYNPVANTTGVDKTTNCSFMIKRENDEYKLV | |
| | INRKISVDRPKRIEVGRTIMGYDRNQTASDTYWIGRLVPPGTRGA | |
| | YRIGEWSVQYIKSGPVLSSTQGVNNSTTDQLVYNGMPSSSERFKA | |
| | WKKARMAFIRKLIRQLNDEGLESKGQDYIPENPSSFDVRGETLYV | |
| | FNSNYLKALVSKHRKAKKPVEGILDEIEAWTSKDKDSCSLMRLSS | |
| | LSDASMQGIASLKSLINSYFNKNGCKTIEDKEKFNPVLYAKLVEV | |
| | EQRRTNKRSEKVGRIAGSLEQLALLNGVEVVIGEADLGEVEKGKS | |
| | KKQNSRNMDWCAKQVAQRLEYKLAFHGIGYFGVNPMYTSHQDPFE | |
| | HRRVADHIVMRARFEEVNVENIAEWHVRNFSNYLRADSGTGLYYK | |
| | QATMDFLKHYGLEEHAEGLENKKIKFYDFRKILEDKNLTSVIIPK | |
| | RGGRIYMATNPVTSDSTPITYAGKTYNRCNADEVAAANIVISVLA | |
| | PRSKKNEEQDDIPLITKKAESKSPPKDRKRSKTSQLPQK | |
| 483 | MASISRPYGT KLRPDARKKE MLDKFFNTLT KGQRVFADLA | Variant |
| | LCIYGSLTLE MAKSLEPESD SELVCAIGWF RLVDKTIWSK | Cas12i4 A |
| | DGIKQENLVK QYEAYSGKEA SEVVKTYLNS PSSDKYVWID | |
| | CRQKFLRFQR ELGTRNLSED FECMLFEQYI RLTKGEIEGY | |
| | AAISNMFGNG EKEDRSKKRM YATRMKDWLE ANENITWEQY | |
| | REALKNQLNA KNLEQVVANY KGNAGGADPF FKYSFSKEGM | |
| | VSKKEHAQQL DKFKTVLKNK ARDLNFPNKE KLKQYLEAEI | |
| | GIPVDANVYS QMFSNGVSEV QPKTTRNMSF SNEKLDLLTE | |
| | LKDLNKGDGF EYAREVLNGF FDSELHTTED KFNITSRYLG | |
| | GDKSNRLSKL YKIWKKEGVD CEEGIQQFCE AVKDKMGQIP | |
| | IRNVLKYLWQ FRETVSAEDF EAAAKANHLE EKISRVKAHP | |
| | IVISNRYWAF GTSALVGNIM PADKRHQGEY AGQNFKMWLE | |
| | AELHYDGKKA KHHLPFYNAR FFEEVYCYHP SVAEITPFKT | |
| | KQFGCEIGKD IPDYVSVALK DNPYKKATKR ILRAIYNPVA | |
| | NTTGVDKTTN CSFMIKREND EYKLVINRKI SRDRPKRIEV | |
| | GRTIMGYDRN QTASDTYWIG RLVPPGTRGA YRIGEWSVQY | |
| | IKSGPVLSST QGVNNSTTDQ LVYNGMPSSS ERFKAWKKAR | |
| | MAFIRKLIRQ LNDEGLESKG QDYIPENPSS FDVRGETLYV | |
| | FNSNYLKALV SKHRKAKKPV EGILDEIEAW TSKDKDSCSL | |
| | MRLSSLSDAS MQGIASLKSL INSYFNKNGC KTIEDKEKFN | |
| | PVLYAKLVEV EQRRTNKRSE KVGRIAGSLE QLALLNGVEV | |
| | VIGEADLGEV EKGKSKKQNS RNMDWCAKQV AQRLEYKLAF | |
| | HGIGYFGVNP MYTSHQDPFE HRRVADHIVM RARFEEVNVE | |
| | NIAEWHVRNF SNYLRADSGT GLYYKQATMD FLKHYGLEEH | |
| | AEGLENKKIK FYDFRKILED KNLTSVIIPK RGGRIYMATN | |
| | PVTSDSTPIT YAGKTYNRCN ADEVAAANIV ISVLAPRSKK | |
| | NREQDDIPLI TKKAESKSPP KDRKRSKTSQ LPQK | |
| 484 | MASISRPYGT KLRPDARKKE MLDKFFNTLT KGQRVFADLA | Variant |
| | LCIYGSLTLE MAKSLEPESD SELVCAIGWF RLVDKTIWSK | Cas12i4 B |
| | DGIKQENLVK QYEAYSGKEA SEVVKTYLNS PSSDKYVWID | |
| | CRQKFLRFQR ELGTRNLSED FECMLFEQYI RLTKGEIEGY | |
| | AAISNMFGNG EKEDRSKKRM YATRMKDWLE ANENITWEQY | |
| | REALKNQLNA KNLEQVVANY KGNAGGADPF FKYSFSKEGM | |
| | VSKKEHAQQL DKFKTVLKNK ARDLNFPNKE KLKQYLEAEI | |
| | GIPVDANVYS QMFSNGVSEV QPKTTRNMSF SNEKLDLLTE | |
| | LKDLNKGDGF EYAREVLNGF FDSELHTTED KFNITSRYLG | |
| | GDKSNRLSKL YKIWKKEGVD CEEGIQQFCE AVKDKMGQIP | |
| | IRNVLKYLWQ FRETVSAEDF EAAAKANHLE EKISRVKAHP | |
| | IVISNRYWAF GTSALVGNIM PADKRHQGEY AGQNFKMWLR | |
| | AELHYDGKKA KHHLPFYNAR FFEEVYCYHP SVAEITPFKT | |
| | KQFGCEIGKD IPDYVSVALK DNPYKKATKR ILRAIYNPVA | |
| | NTTRVDKTTN CSFMIKREND EYKLVINRKI SRDRPKRIEV | |
| | GRTIMGYDRN QTASDTYWIG RLVPPGTRGA YRIGEWSVQY | |
| | IKSGPVLSST QGVNNSTTDQ LVYNGMPSSS ERFKAWKKAR | |
| | MAFIRKLIRQ LNDEGLESKG QDYIPENPSS FDVRGETLYV | |
| | FNSNYLKALV SKHRKAKKPV EGILDEIEAW TSKDKDSCSL | |
| | MRLSSLSDAS MQGIASLKSL INSYFNKNGC KTIEDKEKFN | |
| | PVLYAKLVEV EQRRTNKRSE KVGRIAGSLE QLALLNGVEV | |
| | VIGEADLGEV EKGKSKKQNS RNMDWCAKQV AQRLEYKLAF | |
| | HGIGYFGVNP MYTSHQDPFE HRRVADHIVM RARFEEVNVE | |
| | NIAEWHVRNF SNYLRADSGT GLYYKQATMD FLKHYGLEEH | |
| | AEGLENKKIK FYDFRKILED KNLTSVIIPK RGGRIYMATN | |
| | PVTSDSTPIT YAGKTYNRCN ADEVAAANIV ISVLAPRSKK | |
| | NREQDDIPLI TKKAESKSPP KDRKRSKTSQ LPQK | |
| 4503 | MSNKEKNASETRKAYTTKMIPRSHDRMKLLGNFMDYLMDGTPIFF | Cas12i1 |
| | ELWNQFGGGIDRDIISGTANKDKISDDLLLAVNWFKVMPINSKPQ | (SEQ ID |
| | GVSPSNLANLFQQYSGSEPDIQAQEYFASNFDTEKHQWKDMRVEY | NO: 3 of |
| | ERLLAELQLSRSDMHHDLKLMYKEKCIGLSLSTAHYITSVMFGTG | U.S. Pat. |
| | AKNNRQTKHQFYSKVIQLLEESTQINSVEQLASIILKAGDCDSYR | No. |
| | KLRIRCSRKGATPSILKIVQDYELGTNHDDEVNVPSLIANLKEKL | 10,808,245) |
| | GRFEYECEWKCMEKIKAFLASKVGPYYLGSYSAMLENALSPIKGM | |
| | TTKNCKFVLKQIDAKNDIKYENEPFGKIVEGFFDSPYFESDTNVK | |
| | WVLHPHHIGESNIKTLWEDLNAIHSKYEEDIASLSEDKKEKRIKV | |
| | YQGDVCQTINTYCEEVGKEAKTPLVQLLRYLYSRKDDIAVDKIID | |
| | GITFLSKKHKVEKQKINPVIQKYPSFNFGNNSKLLGKIISPKDKL | |
| | KHNLKCNRNQVDNYIWIEIKVLNTKTMRWEKHHYALSSTRFLEEV | |
| | YYPATSENPPDALAARFRTKTNGYEGKPALSAEQIEQIRSAPVGL | |
| | RKVKKRQMRLEAARQQNLLPRYTWGKDFNINICKRGNNFEVTLAT | |
| | KVKKKKEKNYKVVLGYDANIVRKNTYAAIEAHANGDGVIDYNDLP | |
| | VKPIESGFVTVESQVRDKSYDQLSYNGVKLLYCKPHVESRRSFLE | |
| | KYRNGTMKDNRGNNIQIDFMKDFEAIADDETSLYYFNMKYCKLLQ | |
| | SSIRNHSSQAKEYREEIFELLRDGKLSVLKLSSLSNLSFVMFKVA | |
| | KSLIGTYFGHLLKKPKNSKSDVKAPPITDEDKQKADPEMFALRLA | |
| | LEEKRLNKVKSKKEVIANKIVAKALELRDKYGPVLIKGENISDTT | |
| | KKGKKSSTNSFLMDWLARGVANKVKEMVMMHQGLEFVEVNPNFTS | |
| | HQDPFVHKNPENTFRARYSRCTPSELTEKNRKEILSFLSDKPSKR | |
| | PTNAYYNEGAMAFLATYGLKKNDVLGVSLEKFKQIMANILHQRSE | |
| | DQLLFPSRGGMFYLATYKLDADATSVNWNGKQFWVCNADLVAAYN | |
| | VGLVDIQKDFKKK | |
| 4504 | MSISNNNILPYNPKLLPDDRKHKMLVDTFNQLDLIRNNLHDMIIA | Cas12i3 |
| | LYGALKYDNIKQFASKEKPHISADALCSINWFRLVKTNERKPAIE | (SEQ ID |
| | SNQIISKFIQYSGHTPDKYALSHITGNHEPSHKWIDCREYAINYA | NO: 14 of |
| | RIMHLSFSQFQDLATACLNCKILILNGTLTSSWAWGANSALFGGS | U.S. Pat. |
| | DKENFSVKAKILNSFIENLKDEMNTTKFQVVEKVCQQIGSSDAAD | No. |
| | LFDLYRSTVKDGNRGPATGRNPKVMNLFSQDGEISSEQREDFIES | 10,808,245) |
| | FQKVMQEKNSKQIIPHLDKLKYHLVKQSGLYDIYSWAAAIKNANS | |
| | TIVASNSSNLNTILNKTEKQQTFEELRKDEKIVACSKILLSVNDT | |
| | LPEDLHYNPSTSNLGKNLDVFFDLLNENSVHTIENKEEKNKIVKE | |
| | CVNQYMEECKGLNKPPMPVLLTFISDYAHKHQAQDFLSAAKMNFI | |
| | DLKIKSIKVVPTVHGSSPYTWISNLSKKNKDGKMIRTPNSSLIGW | |
| | IIPPEEIHDQKFAGQNPIIWAVLRVYCNNKWEMHHFPFSDSRFFT | |
| | EVYAYKPNLPYLPGGENRSKRFGYRHSTNLSNESRQILLDKSKYA | |
| | KANKSVLRCMENMTHNVVFDPKTSLNIRIKTDKNNSPVLDDKGRI | |
| | TFVMQINHRILEKYNNTKIEIGDRILAYDQNQSENHTYAILQRTE | |
| | EGSHAHQFNGWYVRVLETGKVTSIVQGLSGPIDQLNYDGMPVTSH | |
| | KFNCWQADRSAFVSQFASLKISETETFDEAYQAINAQGAYTWNLF | |
| | YLRILRKALRVCHMENINQFREEILAISKNRLSPMSLGSLSQNSL | |
| | KMIRAFKSIINCYMSRMSFVDELQKKEGDLELHTIMRLTDNKLND | |
| | KRVEKINRASSFLTNKAHSMGCKMIVGESDLPVADSKTSKKQNVD | |
| | RMDWCARALSHKVEYACKLMGLAYRGIPAYMSSHQDPLVHLVESK | |
| | RSVLRPRFVVADKSDVKQHHLDNLRRMLNSKTKVGTAVYYREAVE | |
| | LMCEELGIHKTDMAKGKVSLSDFVDKFIGEKAIFPQRGGRFYMST | |
| | KRLTTGAKLICYSGSDVWLSDADEIAAINIGMFVVCDQTGAFKKK | |
| | KKEKLDDEECDILPFRPM | |
| 454 | AGTCTTCTCTCTCGCTCTCTCCGCTGCTGTAGCCGGACCCTTTGC | STMN2 |
| | CTTCGCCACTGCTCAGCGTCTGCACATCCCTACAATGGCTAAAAC | |
| | AGCAATGGGTAAGGCACTGCGCCTCGTTCTCCGTCGGCTCTACCT | |
| | GGAGCCCACCTCTCACCTCCTCTCTTGAGCTCTAGAAGCATTCAG | |
| | AGATATTTTATAAAGAAAAAGATGTTAATGGTAACACAGGACCAG | |
| | GAAGGACAGGGCAGTTCTGGGGGAGGTGGGAGGGCAGAGAAGAGG | |
| | TCTATGGAAATCTAAAGCGAAGAATTTCTTTTAAAAGGTAGAAGC | |
| | GGGTAAGTTGCCCTCCTATGGGTAGAGAATTTATTCTGTTTCCAT | |
| | ATTTAAAATTAGGACTCAATCGTGAGGGGAGGAAGCTACCTTAAC | |
| | TGTTTGCCTTAAATGGGCTTAAGGGACATTTTGGAAAGTGCTTTA | |
| | TAACGACCTTTTTTTTTTTTATTTCTTCTCTAGTTTAAGAAGAAA | |
| | ATAGGAAAGGGGTAAAGGGAAGGTGGGAGAAAGGAAAAAGAAAAT | |
| | TGCAAAGTCAAAGCGGTCCCATCCCGCTGTTTGAAAGATGGGTGG | |
| | AGACGGGGGGAGGGGATGGAGAGAACTGGGCACATTTTACGGTAT | |
| | TGTCTCGTCGAAGAAACCGCTAGTCCTGGGGTGCGGTGCAGGGAG | |
| | GTAAGACGGCGGGGGACAGGGTGGGGGTAGGACCTCCGCTCCTTT | |
| | GTTTTAGGGCAAGGGAGGGGAAGGAGAGAGGAAGTCGCGGAGGGC | |
| | GTGGAGGGCGCGGGTGGGCAGCTGCAGGGGCGGGGAAGCGCGCGG | |
| | CAGGGAGGGGTGGAGGGACAGCGGCTTCGAAGGCGCTGGGGTGGG | |
| | GTTTCTTTGTGTGCGGACCAGCGGTCCCGGGGGGAGGCACCTGCA | |
| | GCGCTGGGCGCACAATGCGGACAGCCCCACCCAGTGCGGAACCGC | |
| | GCAGCCCCGCCCCCCCGCCCGGTGCTGCATCTTCATTCGAAAGGG | |
| | GGTCGGGTGGGGAGCGCAGCGTGACACCCAGGAGCCCAACCCTGC | |
| | GGGGACAGCGGCGCCACGCCCCGCGCTCCCCGCTCCCGACTCCCC | |
| | GCCGCGGCTTCCAAGAGAGACCTGACCACTGACCCCGCCCTCCCC | |
| | ACGCTGGCCTCATTGTTCTGCTTTTAAGAGAGATGGGAAAAGTGG | |
| | GTTAACATTTTTCTTTTCGGAAGCAAATTACATAGAGTGTTTAGA | |
| | CATAGACACAGATAAAGGGTTCTTTGAAGACCTTTGATCGTTTGC | |
| | GGGAAAAGCTTCTAGAACCTAGACATGTGTATGTATAATAATAGA | |
| | GATGACATGAAATCGTATATAAAGCAAAAGAGGTCAAAGTCTTAA | |
| | GTTAAGCCACGCGAAATTTCCGTTTTGTGGGTCAGACAGTGCCAA | |
| | ATATCGGCAATTTCATAAGCTCAGAGAGACAAGACAGTGGAGACA | |
| | CAGGATGACCGGAAAAGATTCTGGATTCAGGGCCTTCATCCGCAA | |
| | TTGGTCTTGTGCCTTGAGTGCCCACGGTTCTGGCGCTCAGTGGCC | |
| | CCGGGGTGAAAAGGCAGGGTGGGGCCTGGGGTCCTGTGGCAGCTG | |
| | GAAGCACGTGTCCCCCGGGACTTGGTTGCAGGATGCGGAGACAGG | |
| | GAAAGCTGCCGAAAGGACTCCATCTGCGCGGCTCCGCCCTGCCCT | |
| | ACCCTCCCCGCGGAGCCGGGGAGACCTCAGGCTCCGAGACTGGCG | |
| | GGGAAGAGGAATATGGGAGGGGCAGTTGAGCTGTATGCAGTCCTG | |
| | GAACCTCTTTTTTCAGCCCCGCAGTCCACAACGGCCCGAGCACCC | |
| | CTTGATGTGCGCAGACCCCCGGCGTGGCTCTCAGCCCCAGCACCG | |
| | AGCCCCTCCCAGCCAAGCGGGTGGCTCTGCAGAAAAGCTGGCTCG | |
| | AGCCCCGCCCGGCCACACAAAGGCGCGGCCCCACCCAGCCCGGGC | |
| | GCGAGACCGCAGAGGTGACCCCCTTCCCAGGGATTCAGGGAGGGC | |
| | TGTCTCTTCTCGCCCACCCACGGTCCGCGGAGCTCGGGGCTTTTT | |
| | TTCCCCCAGCCCAAGCCCCCCGCCCACCCTCTGTTCTCTATGATT | |
| | TTCCAGAATGGAGACCCCGCGAGGGGCTTCTCTAAGGGAGACCCT | |
| | CGCTCCTCCAGCGGGGCGCGGCTCGGCCCCACCCCTCCCAGCTGA | |
| | GGCCCAGAGCCGCCTACCGCTGGCCGGGTGGGGGCGCACGTGGCG | |
| | ACTGGGTGTGTGGAGCGCAGCCAGCCCTGCAGAGCCCCGCGCCGC | |
| | GCCCTGCGCTCCCCTCCCCGGAGTTGGGCGCTCGCCCCCGCGGTG | |
| | CAGCCGGGGAGACCGGTTTCTGCGCAGTGTCCTGAGCTACCCCCG | |
| | CTTTCCACAATTCGCAGTTCACTCGCACGTCCAGAAAGGTTCTGA | |
| | GAATGGGTGGTGGGGGCGATCTCGCCTCGCTTTCTGCACCCCTCA | |
| | GAAAGGTTTCCGCTGCAGGCTAGTGGCTGCAAACTCATCGTCATC | |
| | ATCAGTATTATTATCATTTCAAATCGTTGTTATTATTTAATGATT | |
| | CAGTAGCCTTGTTTGTTCTCATTTGTTCAAAAGGGACGTGGATTG | |
| | CTCTTGGTTAAGGATTAACCCTTGTTGCGTTCGCTTTGCTTCCTC | |
| | CTAATTGCCCTCATCCCTTTCCCCCACAAAAAGGTAAATTTGTCT | |
| | CCAGTTGTTCATTTTAAGTTATAAAGCAAATATATTTTTGCTTCC | |
| | TGCCAGGATTATGTATGTTCATGTGGCTAAGATACATGTGCAAGT | |
| | GCTTGCTAAGAGCAGGGTTTGTGTGCCAACGATTGCTGGAAAATT | |
| | CTCTGCAAAGAATTGTTTGTGGCTGCAATGGGTGAGAATACACAT | |
| | ATATAATTGAGATGATCTTCAACATAAGGTTATATCTATAAATAT | |
| | ATAAATATAGTTTATGCACAAAATTTTAAGTTTTTTCCCCTGAAA | |
| | CTGTTCTTCCAACTGCTGATTCTTGATACAGCCTCAATCCTACAC | |
| | AGATACATGGATCGTGAAATGGTAGCCGCCATCCAAATAAAAATC | |
| | CCACCCCAAATATGACAAACGCAAGCATCCTTTCTGGCCATAATT | |
| | TAACTGCATTTGCAAATCATGAAAAAAACACTACTTCTGCAGTAT | |
| | TAAAATAATAGATTTTGAAATTAATTCCAATTTCAAAGATAATTA | |
| | ATTATCAGGGCGAGTGCTTTTTTCCTGATTCATTAAACAATTATG | |
| | TATTCAGCATGATTGTAAGAGGTGCATATAATATTCCCCATTATC | |
| | TTTTCTAATGAAGTGGGCACCTTCTGAATGGATATATAAGTAACT | |
| | AGAAATGAAAAGCTGAGGATTTGGTCAGAATTTCAGGATAAAACT | |
| | GAAAGAAATGGCAGTAGTTTATCAATTAATCTCATGTATTTAGTT | |
| | TATACCAGGTGAGTAAGCTGAGCCTGCAATAAACACTCTCTGTCC | |
| | CAGTGTAACACGTCGCAGGTAGCTAGAATGATAGGATAAATTAAT | |
| | AGACCTTGTGGTGTTTGTCTATGCACGTTAAAATTCTCTGAGAGA | |
| | AAGTATATTTTAAAATGATAATTAAGATTGGACATTTGTGCTATT | |
| | AAAATCTACAACTTTAGTCAAAATTCACAATGGTTTTTTTTTACA | |
| | ATAATGTGACTTACAGATTTGTAGTAAATTATTCTATTCTAAAAG | |
| | AGAAATGAGTGTTTTTATTGTTACAGCTATTACCTCATTAATATT | |
| | TTTAGCAAACTTTTATTTGTTGCATTGAAAGCAGTTTTAATTACT | |
| | TTGGGTTTTTATTTTTCAAATTACTAATGGATAGATGGTGGAATA | |
| | AGCATTTAATCATTTGGCACAATATGACTTCCATCAAATAGCTCA | |
| | TTCTCAGTGATTAAAAAATGCTACAAGAGGCTACAATTTACTCAG | |
| | ATTCAGGAAATGTCCTTTCAGAGTGCCATAAGGCTGATTCATATA | |
| | ATAAAATAGTTTTCTTCCCTATAATTTAAGATCAAATAGTTACTT | |
| | AGTTCTGTGAATACCTAGCAGTAGCTATCAAACAGAATTTTAAAG | |
| | TTAAATCTGTACAACTAACAATGAAGTGGAGGATGAATCGATACA | |
| | TATTGAATGGAAGACTTTGTCATTGATAAATTCAGGCCATCTTTA | |
| | GGAAAATTCCGGATTTATCAATCACCATTATTTTTTACTTCAACT | |
| | GAGTGTGACTGATCACATGCTCAGGCTACCTTGGTAGCTCATTGC | |
| | TCACAGGAGGCTGAAAAAAGCTGGCCTCCGAGCAGGAGGAAGCTC | |
| | AGAGCACAAACCTAGGCCTGGGCGTGGCCACTGGGAGCTGCTGAT | |
| | AGCGAACCCCAGCTCACACCAGTTTCTTTTTTGGTCGTGGGAAGA | |
| | AAAACACATATTATCCTGTTGTCACAAGATCTGTGACCTTATATG | |
| | AAAAAATGCTAGAATTTTTTCATTAAAAAAGAAAATACTGAACTA | |
| | GCCAGTGACCCAGATGTTTTCAGAACCTAGACTGGTTCTGTCCAT | |
| | TGGAAAACCTCGGTGTCTGCATTAACTTTTCACCACACTAGAGGG | |
| | CAATCATGTTCTCTAAAAAAGCAGATGATTGATGTAAACCTAGTT | |
| | CCAAATATTAACTGTTTAATAAAATCTTTTCTTTTACCAGGAACA | |
| | TTCAAGTGTTTATTCAATAAGCTGATGCCATGCTTTACCCTAGTG | |
| | GATGAACAGAGCTTGTACAATTTTCAAGGAGACAGGATGAAATGA | |
| | GTGGTCATAATCTGAAAGTAGATACACGCCCTGGTTAATTATTCC | |
| | CTGATGGTTTTACTTCTCAGTTTTATTACATTGTTATTATAATAC | |
| | CATTTATGTTACTTCTGAGATTTTGTAGTGGATAAATAGTAGAAA | |
| | AATGTCAGTAGTAATAGCAAAGTTATTTAGCAGCCGAATATTTTA | |
| | ATGCTTAAAAATAAAGGAATAAATTAAAGAAAATCATTGTTTACT | |
| | TCTTCATCGATTGAAATGTGCCCCCTGTTCAGAGCACATCTGAAT | |
| | ATCAGAGTCTCCACCTGCAGAGAACATGCAGCTTAGCGAGTAAAA | |
| | CAGGCAGGTATGTGATACTGAGGAGGTGTACCAAAAACTGACTGC | |
| | TGTTATTTTTCCCATCTTCTAAGTCTGTCTTTCTTTTCCATTTAA | |
| | AGATACCTTTTTAAATCTAATCCAATGTGATTTCAATCTAGTTTT | |
| | ATCAGATTTCAACAATTATTGAGCATCTCCTTGTAGTGGTTTTCT | |
| | GTTTATTAGAAAATCGATGTTAATTTTAACGAAGTAAGAAGAAAT | |
| | ATATAAGTATAAACTAATTTTGGGTATCATCAAAAGTGGATTTTT | |
| | TAAATATGCATTGATAGAATTATTTTTTGATTACATTTTATGTAA | |
| | TTCTAATCCAGCTATAAAATATTTAATAGTGTCATATTACTGTGT | |
| | TCCTCAAACTTTGATGTGCATATGAATTACCTTTGATTTTCATTA | |
| | AAATGCAAATTCTGATTCAATACATCTGGCTTGAGGCAGACATTC | |
| | TGTCTTCCGAACAAGCTCCCAGATGATGCTGATTCTGACCACTAA | |
| | ACACATCAGTTTTAGGGATATTAACTTGTAATATACAGGTATCCC | |
| | TCCTGGTAAGCTCTGGTATTATGTCTTAACATTTTTAAATCTATG | |
| | GTAATCTTTACAAAATATTTTACTTCCGAACTCATATACCTGGGG | |
| | ATTTTATTACTCTGGGAATTATGTGTTCTGCCCCATCACTCTCTC | |
| | TTAATTGGATTTTTAAAATTATATTCATATTGCAGGACTCGGCAG | |
| | AAGACCTTCGAGAGAAAGGTAGAAAATAAGAATTTGGCTCTCTGT | |
| | GTGAGCATGTGTGCGTGTGTGCGAGAGAGAGAGACAGACAGCCTG | |
| | CCTAAGAAGAAATGAATGTGAATGCGGCTTGTGGCACAGTTGACA | |
| | AGGATGATAAATCAATAATGCAAGCTTACTATCATTTATGAATAG | |
| | CAATACTGAAGAAATTAAAACAAAAGATTGCTGTCTCAATATATC | |
| | TTATATTTATTATTTACCAAATTATTCTAAGAGTATTTCTTCCTG | |
| | AATACCATGTGAGAAAATTCTTAAGAATTTATTGAGTATGACTGT | |
| | ATATTTGAAAAGAGTGTTTTCTTCTGCTTATCTAAGCCAATAAAG | |
| | GATCTTCATTATTCAATTCTAACTTTCTAAGGAAGTCAACCTACA | |
| | GATCAGAAAGAGGATCTTCAAGGAATAGCATCAAAGACATAGTCA | |
| | GGTCTCCCATGCAGTGACTGGCTGACCATGCAGCCATTACCACCT | |
| | TTCTGGAAATATTATGCTGCAAAAATGATACAATACACGAAATAT | |
| | CTCAAATTAAAAAATATAACATTTCCCAAATAGGGCACTAAAAAC | |
| | ATGATCCCAAATAAAACTAGCTTCAGGGTTTGCAGAATATACTGT | |
| | TACTCAACACAAAGTTGGACTAAGTCTCAAAGTTAGCCATTCAGT | |
| | TGTTGTTAACAGTTCATTTCAGGGTCTCTCAGAAGCTGGGAAACT | |
| | TTCCATTTTTGCAATTTCTTGTACATTGAAGGAAAGGAAGACACA | |
| | CTTAAGACAGCATTACAAAAGTAATTCATGTTTTAAATGTTTAAT | |
| | TCTGGCAGTCGGGCAGGGCTCTCTGTATAACCTCATTTGGAGATG | |
| | ACAAAAATCTAAACTTGAGGGCCTCGAGCCAATAAGTCTTCCTAT | |
| | TTCTTTACTCAAACATTTTCCCGCAATGGTGCTTTCTTTCAACTG | |
| | TTTTTCTGGTGTATTCATAAATTCCAGATTCTCTATGGGAAGTAA | |
| | CTTTTATTGATTGATTTAACCCTTGTATAGCACATATAACATGCA | |
| | AGGCATTGTTCTAAGAACTTTCCACATATTAACTGTGTTAATCAC | |
| | TTAATAATCCTAAGTAGGTTCTATTACAGATATGGAAACTGAGGC | |
| | ACAGAAAGTTGAAGTATCTTACTCAAGGTCACACAGTTAGTCAGA | |
| | TCCAGAATTTGGGCCCAGGCCATCTGGCTTCGGAATCCATCTTTC | |
| | ACCGATTGCTGCTAGTCTCATATCTGTTCCATGTTAGAGGTGAGC | |
| | TCCCATTGCAGAGGTCACACCTGTGATATCACCATTTTATTTAAA | |
| | CAGACCAGAGATGGTCTTCTCCTTTCTGATCACAGACTCACCTTG | |
| | AAGAGAAAATACTTCCAAATTGATGCCTAGTTTTAATAGCTTACC | |
| | TGGGGCTTATTCAAATAATTGCCATGATTTAGGCTTTGGGAGAAA | |
| | GAGAGCTATGAGGCCGTGTGGGTTGTAACGTATGAGACACATGGC | |
| | GTTCTGCAGGCTCAGCACAGCATCGATTTCTGGTGGGAACACACT | |
| | CTGATGACCAGTTCCAGAAATAACATTGACTTAATCTCCTCAGTC | |
| | CCATCATGGTTAGCACATTTCAAAATGCCTCCTTAACTACTTCCA | |
| | TAGGCCAGAGATATTTAGTTTTAACATTTTGTTGAATAAAATAAA | |
| | TTTACACATTCACATTTAATATAACTATTAGATGTTATTTCAAGA | |
| | TTCTCTTCATATTACCATCAAAGCAGGCAGGCAGGCAGGAGAGAA | |
| | CTGTAGGAAGGTTTTGAATCCCTTGTGAAACATTTTTAATTATCT | |
| | TTTAATAAAGGAATCAGGCCCTGTCATTTGTCAAGGAGACATTTG | |
| | CAGTAGTAAAGCTTGTGTTTATAATATCCATTTTTATTAGTCATG | |
| | ATTAAAGATAACATTTGTGTACATTTGTTCTCACAAAACACTTTT | |
| | ATATGAGTGTAAAGGTTAATTAATGCATTTCAGCCATCATTTTGC | |
| | TGGTCATGTGGAAATATAGCTTCTTTAGGAATTGTACTTAGAGTA | |
| | GGAGCCACATATTATACTATAAAACCATAACAAAAATATTTTAAG | |
| | TTTGTTCTCACTTGTTGTTGACCTCCAGAGTAAAATATTTAATAC | |
| | TCTGGAAAGTTATGGGTTTCAAAATTTATTTTATGGCAAGAAATA | |
| | GATAATTACAGTTCTCATAGAGCACATTTAAAATAATTTATTTTT | |
| | ATAGGGCAAAAATATTGCCTAGGACTGAATGATTTTTTTTTTTTT | |
| | ACAAAGATTGTAAAGCAACGCCTGCAAGAGTGCCCATTTAGCAGT | |
| | TATTCTTCTGGAATAATTGTATTTTGGATGTTGGAGTTCGCACAT | |
| | TAACCATTAGTACAAGTACCCAATATAACAATAGATCATCAGGAT | |
| | AATAAATCTGTCCATCTTTTAGTTGTATGTCTTTATATCAGGATA | |
| | AAGAGAATTGAGTGAAATTTATCTAAACCTAGTCCCACAAATACT | |
| | TTTACAAGAGAGCATGTTAAAGTGTAAATTAAATTTTTATTAGCA | |
| | TTCTACTCTGTCTTTGGAAGTTTTTTTTCCTTATGAAATGCAGCC | |
| | ATAAAGTTTAACTTCCATTAACAAAGCTGCTCACAGTAAACCTAT | |
| | TATAATAATAGTTTCCCAGTTTGGGCTTCCTAGTGAGGAGCAACC | |
| | TAACTCACACGAAACAACCCCAACTTATAATATATTGACTGTTAC | |
| | AAAACTGAGACCAGAAAATCCCATCAAGATGGTACTGTTATCATT | |
| | TCCAGACTCTCGGGAAGAACATTAATCATCTCAGGCACTTTTAGG | |
| | ATAGACTTATTGCAGCCTCCCTGGGAACTCTGCTTCAGAACATAA | |
| | TTATTTTTATTAATGCAGAGTTACTTTTTATTTCCAACAAAAATA | |
| | TCTATTGTTATTATTTAAGTCTTACAGCTTTATCTGAGAAATTCC | |
| | AATTAGCACCCTTCTCATAATAAATATTCAAACACATGAAAAATT | |
| | ACCAAAGTTGTTCTAGTCTTTTAATGACATATTACATGATCCTGC | |
| | ACTCTTGTCACTTTAAAAATTATCTTTTTATTATATTTCTGATGA | |
| | TTTTTTTCTTATATAGTTTTTTAAAAGGAGCAGGCAAGCATAGAA | |
| | GACTAAAAAATGTTCAAAAGAAAAATTAAATCGCATGATCTATCT | |
| | ATATGGGACCTTGTCATTTTTAGAAAACATTCACCTGCTTCATCC | |
| | TTTTGAATCTTCATATAATCCCTCTGAGATGGGCATACTATACAA | |
| | GTTGTCTTATTTAAAGATTGGTAAATTTAAGCTCAAATAATTTAT | |
| | TCAGTGGCAAGCCTCAGAGGCAGACTCGGAACACAGGTCTAATAT | |
| | ATATTATATATATATTATAACATATAATATATATATTACATATAA | |
| | TAAAGTTGTGTATATTATTTACCTATCAAAATATTTATATGTAAT | |
| | ATATAAATATGTTATATATCATGTATGTGCCTATTTCATACATAT | |
| | ATACACATTCATGCAAAATAAGGTTTAGCACTCCCTCCACTGTCC | |
| | TGTAATAAAACATGCACAGTGAGAATAGTCATACACGAGGCATAT | |
| | TTGTCTTCAGTTTAAAGTCATTGATAGTCAGTGTCACTAACTAAA | |
| | GTAAAATAGATTGGAGCACCAACTTTGTTCTGAAGCCTGTGCCAG | |
| | GTATTATGAGAACAAAAATAAAAATGTTCCTCACCCTTGGTGGAT | |
| | TTAGTCTTTTGCAGAAAAAAAGATCCTGTACATGTCAGAAAGTTC | |
| | AATAGTAATAATGGTAATTTATAACTATAAATGGAAGTCACCATC | |
| | TCACAATTTCACCATCTTAACAATTTTGTTAAACTGCCCTACAAT | |
| | ATTACAAGATAGTACATAATGATACACTAGTAACATCAACTAGGA | |
| | AGTACCAAGATCCACCAAAAGGCTGAAAAATTTAAATATTTAATG | |
| | AGTCCATCAACCAATCTGGCCAGAGAATTCTTTAATTAAAATGCT | |
| | TCCCAAATTTTACTGAGAATCAGCAGCGTTTGAGGAGCTAGCCTC | |
| | CACCCCCAGAGGTTCTCACTCTATTAGGTCTGAAGCAGGTCCCAT | |
| | GGATTTGCATTTCTAACAAGCTCCCAGGTGGTGCTGATGAGGCTG | |
| | ATTCAGAACCACACTTGGAGTAGACCTAAAACAGCAGTGACCTGT | |
| | AGGGTCCCCAAGCAGCAGGCCAGGACAGCATGTGAGTTACGTCCT | |
| | CTGTGGAGCTCTGCAACAAGGCGTCAAGAGGTCAGAGTCTAAGTC | |
| | CCCATCAGCTCTGCCCTTCTCCACCAGTGCTGCTGGTGCTGCATG | |
| | GAAGGAAGAGCCCAGAAGGGATTCTGAGTTTCAGTCTTTACTCTT | |
| | GCTGACGCACCTTGGTCAGGTCAATTTTCCTGTTTGTTCCTCTAA | |
| | TTCAGCATCTGTAAAATAGCCATGTGAACTGCCTTGTCCATATCA | |
| | GAGGGTCTTTTTCAGACTCAAGGAAAAAAACGTGAAAGTGATTAG | |
| | TGTCTGTCAAGTAGTATATAAATGCAAGAAGTTGAGTTTTTAAAT | |
| | TGTCATTAGATATAAATACCCATGTGCATGCATTTAGAATGAGTA | |
| | AAGAGGGAACAAGGAGCGCAATCAAAAACTGCGTCATTTGCTTTT | |
| | TGAAAAATACTTTCTATGTAATGAAAAGTGAAATAAAATGTTAAT | |
| | TGAGTCCCTCTGACAACAGCATCAGACGTTTTGCAGTTCTTGTGA | |
| | TTAGAACCCACCTGGCCAGCCCTTCTTCCTCCTAAAGAAGAGCCT | |
| | TCTTCTTCTTAAATGAAGGTTGGCTCAGAAGAAGCAATTAACTCA | |
| | TTCAACGTTTTGTTACAGTCAATCCACATCCAACTTTTCCCCAAC | |
| | TCAATCTGCTTTAAGGGAAGGATGGTAAGTGGTGGCCCAAGATGG | |
| | CAACCATCAAGCTTAGAGAATCTCTAGAAGCAGGGGTGTCCCCAG | |
| | CAAGTAGACACTGAAAATATGAGAGGGCTGATAAGCCAGAGATAA | |
| | AACTCAGTACTTACTTTGCTTCTAGTCCATGTCTACCCCTTTCTT | |
| | GGCACCACCTTGACACTACCCTCTGAGTCCACCTTCCTGAGATGG | |
| | TACAAACTCTGCTTAGACAAAGCAGCCCATGTCCAAAGGTGTTAG | |
| | GGCTCAGTTTAAAGCTGCCTTCAAAAGTTAAAACAGAAGTGTAAA | |
| | GTTCTGTGCAATTAAAAATAATCAGCTTGTCTTGGAACTCAAACG | |
| | AATGTAAAATCCTATGAAAATTAAAAAGCAGTACCACAAGTTACC | |
| | CCAAAAGTCCTTAGGTCAGTAACTGTTCCTGTTACAGGTAAGAGA | |
| | GAGCATGGATTAGAGGTGGGCGTGGGTATCCAGTGGACATGGTTT | |
| | TGAACCATGCTCCACTACTACTCACTATCTGAGAATTCTTAAATT | |
| | TATTAATCATTTCTATATTATAATTTTCTCAGTTATGAAATGGGA | |
| | AAACAATACCTAAATCACATGGTTGTTAAGTAAGCAATTGATTGT | |
| | TAAGCATTTGGTCATCAAAAATATTAATCCCCTTCCCTGATTCCC | |
| | TAGATAAATGATGAAAATACTAAATAAAAATAATAAAAATTTAAA | |
| | GTGAACATCTCAATTCTTATACTTTGTTAATTTCTACATGTATTA | |
| | CAAATCTACTAGAAATTACTTGGAATTGAGGAAATGATTACTGCT | |
| | TAATAATTCTTTGTGGTAGAGGGAGAGTTGGTATCATATTTATGA | |
| | GACAGCAGCCAATATAGTATATCTCAAAGGAAAAAATCCATTCTA | |
| | CATAATGCCAGAATTTAATAGTTAAGCATTTTATCTAGGTCACAG | |
| | CACAATAAGCAAGATGGATAATTAAAATAAAAGTATATTTCTCTT | |
| | GCATATATTTCTCATTTCATGTTTCCCTATCATATTTTATATCTT | |
| | ACCTTACTTCAAATACATATATACCTTCAATAAAACTGAGCCTTC | |
| | TTGCTTACCCAGGAAGTTTCATCATTCAGTAGAAATAAAAGATGA | |
| | CTTTAGAAATATTAAAATACAAAAATCTACACTGAGGTCTTTTGA | |
| | ATGCAGGAAAAAGAATTATATCACACACACACGTACACGCACGCA | |
| | TGCATACACACACACAGAACCTCTCGTTCTTTCTTAACATCTTAT | |
| | CAATCCATCAGTTTCACTCCCACTCCGTATCACCTGACTGTGCAC | |
| | AATATCTCATTGCCACCTCCCAGTCTTCTCCCTGCCTGGCACCCT | |
| | CCTGCTCTCCTGCTTCCACTTTAAACACCCTTCCTTCAGCTAGGT | |
| | CTTTTCTTTCAGGGATCCTCCCGTTGCTTTCTTATCTGGATCAAT | |
| | TTAGCCTTCCTCTTCTCCACCCATTAGTGGATAAGCACGACAAAG | |
| | ACACTAGAGTCAAATAATACAAACAGAATATACCTTAGATGAGTA | |
| | TGGTGATGAAAAGGATATGGATACTTAGAGTTTAGCACTATTCTC | |
| | TCAGCCACTCAGGAAAGCAACGCCTTTACAATCAATAGTGTTTCA | |
| | GGTACCAATCAATAATCTGTTATTGCTATTTTTAAAATCTATAAG | |
| | GTATCAGTAAAATGTAATTACTAGAGCAACAAAGATATCTTGTGA | |
| | AATCAAATTAGTATTCATCCAGCAACTGAGTACAAAGGTTTAAGG | |
| | GAGGATAACTACCAATACCAAAACATTTTAAGCATTTTGTTTTGC | |
| | CTCCTAAATATCAAATCATGTAAATGTGTGGTACATAAATTAGGA | |
| | ATTATATTTATGACATAGCTGCAGACATATTAAGAGAAATATGTG | |
| | CTTATATTTACAAGTATAGTACAGTTCTTTTTCATATTAGATACT | |
| | GTTGATGATAATCTGCATATAAAAATGCTCAATATTTTTTCACAT | |
| | TTATAAGCCATAAAATACAGCTAATAAAATGTGTTTCTACTTTCT | |
| | CATAAACATGGAATAGTGACAAACAAGGAGCTTTATATGAAAGCA | |
| | CCATTACAATTTAAACTCTCACAAGGTCATAATATATTGCACTAA | |
| | GCAGGAGAGTTCAGCTTATTTAAAAAAAAAAATAAACTCTAATGA | |
| | GGTTCTGGAATGCAGAGCCAAAGCATAAAGATGGAAATAAAAGAA | |
| | TTGCATGTCTTCTGAACTGACTTGGTTGATGATTTTTTTAAAAAA | |
| | GGTTTTGTGTCTTCTGACTTGGTTGATGATTTTTTAAAAAAACGT | |
| | TTTGTGGTAGAACAAATAAGGTAAATGAAATTCAGTATTTAGGAT | |
| | GAAAAGTTTTTCTAATTTCAGGAACAACATTGAAGAAATATTGAA | |
| | CTAAGCAGCTTTGAAAGAATCAGATTCCATTTGTTGAAATTTTTC | |
| | TGAGAATGAATTTTTTTAAGACAGTGTACACAGTTGCAGTGTGTA | |
| | TTGGTTATGGATTGTGGCAAGCTATATTACAACTTACCCAAGAAA | |
| | TAAGGAGGCTGGGCGTGGTGGCTCACACCTGTAATCCCAGCACTT | |
| | TGGGTGGCCGAGGCGGGCGGATCACGAGGTCAGGAGATCGAGACC | |
| | ATCCTGGCTAACACGGTGAAACCCCGTCTCTACTAAAAGTACAAA | |
| | AAATTAGCCGGGTGTGGTGGCGGGTGCCTGTAGTCCCAGCTACTC | |
| | GGGAGGCTGAGGCAGGAGAATGGCGTGAATCCGGGAGGGGGAGTT | |
| | TGCAGTGAGCCGAGATTGTACCACTGCACTCCAGCCTGGGCGACA | |
| | GAGCGAGACTCCGTCTCAAAAAAAAAAAAAAAAAAAAAAAAAGAA | |
| | AGAAAGAAAGAAGGAAAAAAGTCACTTGAAAAGAATACTGGACTT | |
| | TGTGTCCAGCTTGCATAGCTGAAAAGAATAAAAACCTGTCCACTT | |
| | AAACTCATTGCAAAAAGAAGATGTCACTCCTACAAATAGCAAAGA | |
| | GTCATGAAATTATTCTATCCAGAAAAGTATACATTTCATCCCTTT | |
| | GGATAAATTTTAGAAGTGAACTATGAATACATACGGTGAGGATAG | |
| | CCAGCTAAGAAGTCAAGAAGGATTTCTCAAATTTGCTGCTCAGAA | |
| | AGATCATACTCTCCACAAAACAAATAATAGCAGGCTTTCCAAGTC | |
| | AACCTTGAATCCAGCTTTCCTTTATCTTTCCTTCTTGTGAACTTT | |
| | CACTAGTTTACTATCTAACAATGAATTTGACGATAGCCACATACC | |
| | ATCTTATAGCAATATTTGTTATCATATCCCTTGTTATTTATCATT | |
| | CACCTGCTCTGCTTGAGCCAGCTACAAGTCACATGTCCCACGCAC | |
| | TTTTTCCTGTTTGATTTTTTACAGCACTTTGAGACATGTCTCATT | |
| | ATTCCTACTTGACAGGAAAGAAGCCATGGAAAGTTGAGTGACTTG | |
| | CTCCTGATCACAAATGCTGGCCAAGGAAGAGTCGAGTTTCAAATC | |
| | TAATGATCTTTCCACTGCACTCTAGATTCCTCATTTTGAACTATT | |
| | TTTTTATTTTTTGCACTATAGACTTTTTTCCACATTTTGAACTGT | |
| | TTTTTATTTTTTGCACTATAGACTTTTCTCTTATACCCAACTATA | |
| | TTGATGACTTCTTTTAGGCTAGAAACTTGTTTCACTTACTTTCCC | |
| | TTTCTTCAGATTGCTGCAATATTGGCCAACATGTATTGGGTACTT | |
| | ACTGAGTCAAGTACTGTGATTGTGCCAAGTATCTTATAGGAGGAT | |
| | TATCATCCTCATTTTTACAGGTGAGAAAGGAAAGGAGGTAAAGTC | |
| | ACACACAGCCAACAAAAATGGTAGCACCAGGATTTGAAACAAATC | |
| | AGTCTGACCCAAGTTGACTTTGTTAACCACTGTATGCACAGTCTT | |
| | CTTAGACATAGTAAGAGCTCTAATTGTGTTTGGTGATTTGATTAT | |
| | TATGACAAAGTAAGTAAGGGAAGCAGGGAGAATTATAAGAAATAA | |
| | GGCTCCACAACACTTGGCTATAGCAAAGCCCCTTAAAACTTCAAA | |
| | AGGTCACCCAAAGAATAAAGATCAGGCTGGGAGCAGTGGCTCACG | |
| | CCTGTAATCCCAGCACTTTGGGAGGCCGAGGTGGGTGGATCACCT | |
| | GAGTTCAGGAGTTCGAGACCAGCCTGGACAACATGGTGAAACCCT | |
| | GTCTCTACTAAAAATACAAAAATTAGCTGGATGTGGTGGTTGCCG | |
| | CCTGTAATCCCAGCTACTTGGGAGGCTGAGGCAGGGAGAATCGCT | |
| | TGAACCCAGGAGGTGGAGGTTGCAGTGAGCCGAGATCATGCCACT | |
| | GCACTCCAGCCTGGGCAACAAGAGCAAAAAACTCTGACTCAAAAA | |
| | AATAAATAAATCAATCAATAAAATAAAGATCAATTTGGAGAAATT | |
| | AATGCTTATTAATAAGCAATGTCTTGCACAGCACTTCAGTTTCTC | |
| | AATACATTACCTAACTCAATCCTTACAACAACACCCTATCCCCAT | |
| | TTTGTGGATAAATAAACTCATGTTCAGAAGGTTGAATAAATTATC | |
| | TAAGGTTAATAGTTCCTGACCTAGAGCTCAAATCTTCAGTTTCTA | |
| | TCATATTCTTGCCCTTACCCTGGGGTAGCTAACATTCACTCACTA | |
| | GTATTGGAGCTAAAATAAGGGAGAGAACATATAAATGAATACAAA | |
| | GGAGACATTCACCTGCCTTCTCTTTCTCCTTACATAGAGAAGGTT | |
| | GATTATCTGCTATTGTGAAGTTTGCCTTTTGAAGGATAGAAATGA | |
| | GAAGACTTTCTTAAATTTTGCCTCTACGCCAAGAAATTAGAGTGG | |
| | TACCACCAGTAGTTCCATTTTCAAACTATCACTGTAGCTAAAGCT | |
| | ATGTGGTAAGGGCCAAGGAAAAGAAGTATTCTTGCACTTCAAAAT | |
| | GCACTGAAATACCAGTCAGTAGCATAATATAAAGGAATTTAGTGG | |
| | AGAGAAGAGTTGACCTCAATCTGGCTCCAACATCTCGGCTCTTAA | |
| | CCCCTACCCTACACTTGTTCTTCATGGGGAAGCTAATTGGGCCAC | |
| | TGGAAGATTCAGCAGCTACCATTTGCAGCTGAGGGACAGCCCCTC | |
| | CCTGCTTAGCAACCAATGGATATGCATTTATGGAACACCTGCTAA | |
| | CTGCGACACACACTCCTATGTATGAGGGAAAATACAAAAAATGTT | |
| | AAAGGAGATGCCTTCCCTTGCCCTCAGGAAACTTAAGTATAGTTG | |
| | CAAAGAAATGATTAGCAGCAAACGAAACCATGGAGAAGTAAGGGC | |
| | TAAGGTCTGTGAAACAAGCCTAGAAAATAACCTTGTCCTTGAAAA | |
| | ACACAAAAAGAAAGAAAGAAAGAAAAGAAACTCCAAGGCCCTTGT | |
| | GAAGGAAACCATTAAGTTTGCTTCACTTCTGTGTTTAGGAAGACA | |
| | CAAACCCAGTCTTAATGAACCTCAAGGCCACAACTACTGGAGACA | |
| | TTTAGGAATTGTCACCACATTCTAATGTATATATCCTCTGTTTGG | |
| | CCCTTCCTATTAATATTTTGTAAAATTTTTGAAGATATGAGCAAT | |
| | GTTTAAAACCATGAATCCCCCTTTTTTTATAAGTAATATTTAGGC | |
| | TGAATAAACAAGAGAAAATAGGACATAAAGGGGAGCCAACGTGTG | |
| | CCTTCATTTATAATGTATTCCCAAGTTGTGAGTTTGGTTTATCAG | |
| | CAATTTATCATGCCAAATTCCAAGTCATATTTATCTATGCAGATC | |
| | AAACACTTGATTCTATTTTTGCCTTAATTTTTTTATTGGGTATGT | |
| | TTATGACCAAGTCATATGGTATTTTCTGTGACAGATAAAATGCAC | |
| | AGGTTATTCCAATCTGGCTCAGCCAGTCATAGCAACATGTAGTCC | |
| | TTCTCATGTCTTAAGAATGAGTATCAAGAATTCAAAGGGAGTTCC | |
| | AGATGGCATCCAAAAAGCTTACAGTTTATGCATCACTTATTCTAA | |
| | CAGTAGAAAAAGAATATTTGAAGCCAAAAATAGACCTTGCATGTA | |
| | GCATGTGGAAGAGTAGAAATTGCCCTGATAGTTAAACAATTTGAA | |
| | ATTCAAGACATTAATTTCTTTATGAAGCATTTGTCACATCATAGG | |
| | TAATATTTTATGCCTATCATATATATACTTATTATGAAATACAAA | |
| | GAAATTATTCATTCTATCTAAGACTTTGTATCCTTTACCAATATC | |
| | TCTCCATTCTCCCACCTCCACCCTAGCCCCTGGAAACCACCCTTC | |
| | TACTCTCTGCTTCTATGAGTTCTTTTTTAGTGAGATCATGCAGTA | |
| | TTTGTCTTTCTGTTCCTGTCTTATTTCACTTGACATAATGTCCTT | |
| | CAGGCTTATCCATGTTGTCACAAATGACAGAATTTCCTTCTTAAG | |
| | GCTGAATAGTATTCCATTGTGTGTATGTAGCACATTTTCTTTATT | |
| | AATTCATTTGTTGATGGATACTCATATTGATTCCATATCTTGGGT | |
| | CTTGTGAATAATGATGCAGTGAACATAGGAGTGCAGATATCTTTT | |
| | TGACATACTGATTCCACTTTGATGGGATATATACCCAGTAGTGGG | |
| | ACTGCTGGATCATCTAGTAGTTTTATTTTTTTTTATTTTTTATTT | |
| | TTTTTATTTTGAGACAGAGCCTTGCTATGTCGCCCAGGCTGGAGT | |
| | ACAGTGGTGCCATCTAGGCTCACTGCAATCTCTGCCTCCTGGGTT | |
| | CAAGCAATTTTCCTGCCTCAGCCTCCTGAGTAGCTGGGATTACAG | |
| | GCACGCACCACCATGCCCGGCTAATTTTTGTATGTTTAGTAGAGA | |
| | CGGGGTTTCACCATGTCTCGAACTCCTGTCTTCAAGTGATCCGTC | |
| | CACCTCAGACTCCCAAAGTGCTGCGATTACAGGTGTGAGCCACCA | |
| | CGCCTGGCCTAGTAGTTCTGTTTTTAATTTTTTGAGGAGCCTCCA | |
| | TACTGCTTTCCATAATGGCTCTAGGAATTTACATTCCACCAGCAG | |
| | TGCACAAGGATTGCTTTTCTCCACATTCTGGCTAACCAGTCTCCT | |
| | GTCTTTTTGAGAACAGACATTTCAACACGTGTGAGATAATATCTC | |
| | ATTGTGGTTTTGATTTGCATTTCCCTGATGATTAGTGATCTTGTG | |
| | CCTTTTTTCATATAACTGCTGGACATTAATATGCCTTCCTTTGAG | |
| | AACTGTGTATACAGGAGAAAATAATCACTTCTCAGAGGAGCTTTC | |
| | ATTTCAAAATATCCGGGAAAAAAATAGAAAAAATGGAAAATTTAT | |
| | CCTAGAGTAAGTTGTCTTTTATATTTTGACCCTGTTTGTGACATA | |
| | AACTGGATGATACAAAACTGGAATGCAAAGGCTTTAGGAGGATTA | |
| | CTTACTTACTTGTATATTGCTTTAGGTTGTTTGCAGAAAATTATA | |
| | CTAATTGAAGTTCAGGCTATGATGTGATAAAATCTATGTCAGGAG | |
| | ATGAGTCTACATGCAAAGTTTGAGGAAGTGACATTTGAGTTTCAA | |
| | AACAAAAAAGCAATTTTCAATGTCATATCTAGGTTAACCCAAAAG | |
| | ATTTCTTTCACCCTATTTAGCTGCCTCTAAGATGGATGCTGAGGA | |
| | TAATTACACTGTAGAACAATAGGACGATGCTTCACACTCACCTCA | |
| | CAGGCTCTGTTATTCCCACATACTGCCAGAGATACTCCAAAATAA | |
| | AATCACTGCAACATCAGGCAGTTATAAACCTCAACGGTATTATTT | |
| | TCTATTTATATACAGTATATTTTATATTTTACAAGTATAAAATAG | |
| | AATATATTTATTCTATTCTCTTTGACACAAAGTGACCATAAGACA | |
| | TATTACTTAAGTATGACTAGCAAAGTCATGGGGCTTGTCATTCAG | |
| | GAGGAAACTCTTAACTAACTGTTCAGTTTTTGTTCACTGCACCAT | |
| | TTACATAAGCCAAACTAATGCTTCACACTGTGCAAAACAATGCAC | |
| | AGTGTTGTGAATGAATGGCTAAAATAAAACTCTAATGAGTGGGGT | |
| | TTGAAAAATGCAACTTTAGAAAACTGTTGAGAAAATGTTGCACAC | |
| | TGCGCATTTTACAAAATTTCGTTGAAGGACACTGGATATTCTTTT | |
| | TAGGATTATGGAGGGAAGCAAAATTTTGGCTCCTACATGCAGTTT | |
| | TTGTGGCCTTTGCCTGAAATAGTCATCTCCCATTAATTATTTAGA | |
| | TATCATTCATTTCCTAAGACAACATTTAGGGAGACTGCCTTAAGT | |
| | ACAATTTGTACACTACCCAGATAAGAATTCTTTTTGGTGAAACAT | |
| | CGATAAATATTACTTGGCAGTAACACCAAGTTAAAATATTTGTTT | |
| | CACAGTCGACGTTAATAACTATTATAGATAAAGTGAATTTTATAA | |
| | GACATACTCAGATCTAAAACAGCAATATGGAGCTCTTCAAATCCA | |
| | TTGAAACTTCATACCAGCCTACGGAAGTAGAGGTTTTTATGCAAA | |
| | CTCTTCAAGAAATATGCTCTGAACTTTTAATTCCTTAGATTGATA | |
| | GAGGAATTAAATCATGATATAACTAATAGGTTTGTGGTACAAATT | |
| | GCTGCTGCTTAATCTGACTCTGTGTCTTCCCAGTGTTCTATATGA | |
| | ATTAGATATTCCATTATCTAAAGACAATCAACCCCATCCCACGGT | |
| | GATAGCTCTAGGACTCCCTTTGAGTTCATTAAATCTGTATTCTCA | |
| | GTCTCCAAACTTCTGGTTAATTCAAACAGAAAAGTCAACTGGCCC | |
| | ATGAACTAAAATAAAGTCATCTGAATTTTTTTTTTATTTTGCAGT | |
| | GTGATAAAAGTCTCGCACTTTTTATTTCTGAAAGTTTCTGCTTTC | |
| | ACTGAGAGCATAATAGGCTATCCACCCTTATGCAATCTTACATAC | |
| | AAAGTCATAGTCAGGCTAAATTCAAAAACACATGTGAGATAGAAG | |
| | TCAACGTTTATTTTCTGGAGAAAAGCCACACATTACAACAAAGTG | |
| | AACAATGAAGCTGGCATCCTTATCACTGGTGACCAAAACATTTGT | |
| | GACTCTGGACATTGGCCCCACAAATGCGATAAACATTCTGCATAG | |
| | GAAGTGAGTTTTGCTAATTAAAAATGGATCCAAAATACTTTCTAC | |
| | TCTTCAGCCAAGAATTAAAAAGTAATAGGGAGGAATTGAAATCAC | |
| | TTGGGTGCTACATTGAGCCATTCTGGAGAAGCAATTCAGAGAATG | |
| | TCATGGCAGCCTCAAATTGCTGCTCAGGAGCATCCCAGCTTAGAA | |
| | GATTGCAGGAAAGGAAGAGCAAAGTCATTCTTACATGAGAACTGT | |
| | CCTTAACCAGATGAATAGACTCTCCATTTTTTACCCTGGCTTTGT | |
| | CTCATTTAAGTCCCAACCAATCTAGCTATCATTTTAGGTTTTACT | |
| | ACCTGCTAGTATTTAGGAGCTTAGGGGGATAAAAAAATCCCTCAA | |
| | TACTCAGAATTAGACTTGGTGATAAAAATCTTGACACATAAACAG | |
| | AATAAAGCGCTTTCATTACTCCTCTAAACCACAGTGTCATTTGGT | |
| | CTCTATCAAGGACTGTAAGAATTTCTTTCATCAGGGGAAAGAAAA | |
| | AAAGGACAAGAGCCTGCAAGATGTAGCGGAACTCTCATTAAACAC | |
| | AGCAGGAGCTTTAACTGGAATCCAGAGTAAGGTGAGGTACCAGGT | |
| | TACAACAATTTACTGCTTTTATTACAATTTTGATCACAAGGACTG | |
| | ATTCATGTCATCTAGTTTCTTTTCCTTGTCACTATCACTGGTGCT | |
| | AAGAATACATCAAATTGAAATTTAAGAGCCTCATATGTTTCTGTA | |
| | TAACCCAGTGATGGGTTGTACTGCTTTGACCTTCTTAAATGTCCC | |
| | TTTATTTCATTTGATATCCATTCCCATAGAAAAACTATAATGCTT | |
| | TGGTTGGTCAAAATATTAATCTTTCAAAACCTCCCTGGCTTAGAA | |
| | AACCAAATTTTTGTAGAGAGAGATGGGTAGAATCTAATTTTATTC | |
| | TAAAGCAATTAGCATTACATCATCACAGCAGAAATATCTAGAATA | |
| | TTACCTCATGTCAGTGATCTTCTGATATGTTAAAAAGGGTATTTT | |
| | AAAATCTGAGTTATTTCTTTTTCTTTTTAAAGTTACATCATTAAT | |
| | TACATACTCATCAACCAAAATATTTTATGCTCCAAATTTGAACCG | |
| | ATATAGTATGTAAGAAGTGTTCAAAATGAAATTATTTTGGTCTAT | |
| | TTTGTCTTTGAAGAAGATCACAGGGATGGACCTCCCAAAAGGATT | |
| | TTTAAATGGGATTACATATCTGACTTTTAAAAAAAATTATCTGAC | |
| | CTTGAGTTATAGTGCCCCAAAGTAAGCAAAGTTCCAAACACACAG | |
| | TATCATCAGAATTGAGTTAAAATTATCACCAGGGGCTTAATTTCT | |
| | GAAATTAAAAAGGAAATGTTATTTCCTTATGAAAAGAAAAGGAAC | |
| | CAAAAATGAACTTCAAGGTAGCTGATTTCTGTCTATGTTAAGACT | |
| | TAGGTAATGGGAGAAAGGGAAAAGGAAGGACAGAATTAGGAGAGG | |
| | AGCAGTGTTTAACAATTGCGGGTGCAAGACTCAAGTTTTTTAGAA | |
| | TCCATTAGCAGAGAACCCTATTTCTCCCATTAACTGCTGTCCTTT | |
| | TAAATCCTGGCACCAGCTCTGAGGACTGCAGGGTCCATAGCTAGT | |
| | GCCCCACTCTACCCAGTTTAAAGACACCACTGCCTGGAAATGACA | |
| | GGGGTTTTTTTCTTAAGGAAAGAGGTGCTTTCTGCCACGTATATA | |
| | TAAATTGGTAAGCTTCAAATAAAGTGCTTTTGTCCTTTCTGTCTA | |
| | TCAGAAACTGTGCAAATCGAATTGCTGTAAAACCAAGGGCAAGAG | |
| | ACATCAATCCTGCATTCTATAGCATCTGATTTTATCCTTTATCCC | |
| | CAGGCACATTTCAAAAGGAAAAAAATGAGGTTGCATTTAAATTGA | |
| | GTATTTGGGACTTGCCAGGAAAACCTCCCGCTAGACTAATATGAT | |
| | TGCAGGGAAAACAAGAGAAAGGAAAAGTGGAGAGGGAGTGTGCTA | |
| | ACAGATCCTGGGCCTCGTCAGCAGAGCCGTCCTGAGCACAAGGCC | |
| | ATGGTCAGACATCTGGTCCCGCGAATGACGTTTTCTTTATGGTCA | |
| | TTAAGAACACCAGTGTGTCGGGACACAAACAAGTATTCCTTTCAG | |
| | GGATTATGACACATTTTCTCCCAAAGTAGTATATTAATGACATTT | |
| | CCAGAGCATTCTTTACTATCTTTTATATGTGATCAGGAAGACTAA | |
| | TACATATCACTACTTCTTTTACACACAGCATTAGCCAAAACTAAA | |
| | GTGTCAAATACAATTTTGCCTAGGATGAATAAACAGAAGAAATTT | |
| | TTATGATACTGCACTATCAATTCCAAATTAAATAACAACAAAATG | |
| | ATAAGTGTTAAAATTCATATTAATGATTGTTCCCACACAAGCCGG | |
| | AAAAAATCTTTCTAAGAAGTCTTTCATGAGTTAATCCCATCTTTC | |
| | AAAGTGTTCAGTGGCTCCGAATTCAGTTACTGTTTCCTATCAGTT | |
| | CTTCTTTCATTAAGTCTCTTCCCTTTTTTTTCTCTTTGCACTATT | |
| | TCCCTTAGCCGGGTACATAATCTGCTGTGCTTTATTCATTTGTGT | |
| | CTTAAGTTTGTTTCCCGATGACATACCTTTCCAGCAACGCCATCT | |
| | GGGGAGTTTGGGCAACTGTACCACGTTAGGAGGAAACCCTTCTTC | |
| | ACAGGAGAGTGTGCCTTTGCTGCAGGGAAGGAATTAGGATTTGCT | |
| | TGGACTGTGGTTGCAGCTGGCTTTTAAGGATCTCCTTAGAATGCA | |
| | AGCAACTCATCAATGAGAATCTCTGCAATGGTTGTCACTGGGTAG | |
| | AGTCATGCTATGTGGGGTCATAGCCTTTGAAACAAATAACAGTAA | |
| | AGATAAAAATGCTATTAAAGGAATCACCACCCACAGAGGTTAACT | |
| | GGGTTTTGTCCCCAGACCACCTCGAACAAGAAAGAACATTTTTAT | |
| | CAGTCATTTTCTTAGTTTTAGCTGATAAAACAAAGTACCATAGAC | |
| | TAGGTGGCTTATAAACAACAGAAATTTATTTTTCACAGCTTTGGA | |
| | AACTGGAAGTCTGAGATCAGGCCGCCAGAATGATCAGATTCTAGT | |
| | TAGGGCCTACTTTGCTTTTGCAGACTGCCAACTTCTAGCTGCATT | |
| | TTCATGTGGCAAAAGGAGATTGAGCTAGCTCTCTGGTCTCTTCTT | |
| | ATAAGGACACTAATCCCATTCATGAAGGCTTCACCTTCATCATCT | |
| | AATTACTCTCCAAAGACCCCACCTCCAAATACTATCACATTGGGA | |
| | ATTAGATTTCAAATACAAATTTTGCGGGGACACAAATATTCAGTC | |
| | CATAATAGTAATGATTACTCATTATACATAGGGCTCTAAATGTGC | |
| | TAGCTTCTGATAGTTTTTACACTCACTTCTCTTTATTAGCTTGTC | |
| | AAGCATAATTAGGGCAGTGGCCTTACTGAAAATTATTGAATTTAG | |
| | TTTCCTAAGGACAGATATTGAGGAGTTTTTTCTTCACTAAAAATT | |
| | CACGTTCCGATACAGCTTTCATCTGTTACTACTTTGTGAGATGGA | |
| | AAATCTTTTATTTTATTTTTATGTTTGGATTGACCCTTCTTAATA | |
| | AAGTCGGCATGTAATATGCTTCATGTGTTTCTAATATGTGCTTAA | |
| | TTTTGCAAAATGTTTTGCATACCAGAATGCATTTCTCTTCCAAAA | |
| | AAGGTACCAGCCTACAAAACCTTGCTGTTACTGTTTTCAATTAGT | |
| | TCATGGAATTAAATGTATTAAATGTTTTATGCTCTGGCAGAAATT | |
| | ATGATTCTCACTTAACTCCATATAAATCTGGATCTGCCTGGGCCT | |
| | TTATAAGTGACACAATTTCATTAACTGAATAAACAAATGATACAA | |
| | AGAAATTTGGTTTAGCCTTCTAAAATTCCAAAGGCGTTCAACAAA | |
| | ATATCTCAGAATGGATGTTCCAGGACTTTTATGGCACAGGACAAC | |
| | ATGTATTGCTTATTTTAAGAAAATAAGCTAAATAGTGAGGGGATT | |
| | CTTTTAGCAGATCCTCAGGATGTGTTAGGTTGAATCATAGGCAAA | |
| | TGATATTTGATCATTGCACCTGTTAACACATTGAACCTCATCCTA | |
| | AAATTGTAGAGCTAGAAGAAAGCCTTCTGGCAGTTTTTAAATAGA | |
| | TTGATTTACTGCAATTTATCCAGAAGCTTCACCGTTGTCACTGGC | |
| | TACATGTGACTTTGGCCTCTGTGGGGCTATATCCTCATTTGTAAA | |
| | ATTGGTGGTGAGGTAGGTGGACAGTTGACTAAATAATCTCTTAGA | |
| | ATAATTCTAGTATCTGTGGATCTAAAGCATCCAGGGGTTGAATAT | |
| | GTTTCTTTCTGGCCAAGAAAAGATGCACCTGTCAATAATGCCCAA | |
| | ACTCATCTTCTGAGAATCCTCTTTCCCAAGATACCCACTCTCCCT | |
| | TGGGTTATATTATAGTAATGATCAGAAGCCCCTGCCAAGAAGAAA | |
| | CTGTTAACCTGGGAGGTCTATATTTTATTTCACAGCCATCTGTTT | |
| | ATACTTTCTCACAAGTTAGTGCACAGTATACCCATCATTTTCTAC | |
| | CATTTTCCTTAATTTATTAATTTTACTAATTGCATAATTAACAAA | |
| | AGTAAGAAGATTTTACCTCCTTATCCCCATCTGGTAGTTTGCAGA | |
| | TACTTGGCCTGATGACAACTGACAGTGATGAGATACTCACCAAGT | |
| | TTACCAGGGCAGGAGGCTTCCTAGAGAAAAAATGAGAAAATGAAA | |
| | TGGGGAAGGGGAGTGAAGGATTGAGGAGGTGACAATCTGGACTCT | |
| | TGCAACTGCATGGCAAGGTTGGCACACAAGCTGGGTTGCAACGGA | |
| | GGGAAGGAGATCCTTATCAGATGTAATCAGAGCTCAGATCGAGGG | |
| | CTTTGGTGTGTGTAGAAAGAGGGAGAGACAAAGAACTTAAAACAG | |
| | AGCTGCCATTTGACCTTGCAATCCCATTACTTGGTGTATACCCAA | |
| | AGGAGAATAAATCATTCTATTAAAAAGACACATGTGCTTGTATGT | |
| | TCATGGCAGCACTATTCACAATAGCTAAGACATGGAATCAAACTA | |
| | GGTGTCCATCTATGGCAGATTGGATAAAGAAAATGGGGTAAATAT | |
| | AAAGCATGCAATACAACATGGCCATAAGAAAAAATGAAATCATGT | |
| | CCTTTGCTGCAACATGGATGCAGTTGGGACCCATAATCCTAAGTG | |
| | AATTAACACAGGAACAGAAAACCAAATACAGCATGTTCTCACTTA | |
| | TAAGTGGGAGCTAAACACTGAGCACACATGGACATAAATATGAGA | |
| | ACAATAAACACTGTGGACTACTAGAGGGGGGAAGGAGAGAGGTTT | |
| | GTAAAACTACCTATCAGGTGCTATGCTCAATACCTGGGTGATGGG | |
| | ATTTACACCCCAAACATCAGCATCATTTAATATTCCCATGTAAAA | |
| | AGACTGCACATATACCCCTTGTATCTAAAATAAAACTTGAAATTA | |
| | AAAAAAAAAGAAAGAAAGAAAGAGGCTGGAAATAGAGGCTCACAC | |
| | CTGTAATCCCAGCACTTTGGGTGGCCAAGGTGGGTGGATTGCTTG | |
| | AGCCCGGGAATTCAAGACCAGCCTGAGAAACCTGGTGAAACTCTG | |
| | TCTGTACAAAAAATACAAAAATTATCCAGGCATGGTGGAGCGCAC | |
| | CTGTAGTCCCAGCTAATGGGGAGGCTGAGGGGGGAACATCACTTG | |
| | AGCCCAGGAGGTGGAGGTTGCAGTGAGCTGGGATCACACCACTGC | |
| | ACTACAGCCTGGGTAACAGAGCAACTCTGTCTCAAAGAGAGAGAG | |
| | GAAAGAAAAAAGAAAAGATGGACAGATAAGAAAATGCACTTGGAG | |
| | ATTAAGAGAAAGCAGCAACATAGGACCCTGGATAATGTGTTTGCT | |
| | TAATAACTATCCTGATGAGTTATCTGACTATTCCCAAATGAGTAC | |
| | GTGGCAATTCAGGCTGAACCATCAGAGTAGCCCTCCGGAATCTTA | |
| | CTTATGTACAATAGACCTGCATGCACATTTACTAGAATGAGCCTC | |
| | TCTCTCTGGTAATCATGTCTGCTTCCACTAATTCCATCTGTTTCC | |
| | TCTCTCTCCCTCCTATCCTGCTAGATCTTAATTCCTTCGACCTTC | |
| | CTTTGTTTTTCTAACTCCCTTTCTTTCTCTTGTTATTTAACCTGC | |
| | TATACTATGCAATTGATCTCCTCTGCACTAAGGAACATGCACTTC | |
| | AGAATTCTGTTGACATCTTGCATTCCTTTATATTTAGTGAAAGAA | |
| | TGCAAAGGAGTCTACCTGGCAATATTCACTCTGCAGGAGGCAATA | |
| | ATTATTATTCAAATTAAAGGAAGCAGTAAAGAGAAATTCAGAAAA | |
| | AATGAAATATACTAATCTTCAGCTTTTCATTTCAGCCTACAAGGA | |
| | AAAAATGAAGGAGCTGTCCATGCTGTCACTGATCTGCTCTTGCTT | |
| | TTACCCGGAACCTCGCAACATCAACATCTATACTTACGATGGTGA | |
| | GTAACCTAGGATAGACATACCCCTGCTAGCTAGATCATTTGGAAA | |
| | GGTTGACATATATTTGTTTCTTACAGCTCCTGATATAATTACATC | |
| | AATATTTTGTAGCTCTCACTATTGACTTGCCGTGTCTAGCTATTA | |
| | TGTCCAATTGATTACCTATTGCTGAAAACAGTTTGAATTTGGTGC | |
| | TAATAACAACACATCAATGTCTGTTAAGAAATGTGGATGGATTCT | |
| | TATTAACAGCCACATCCAGCATATCAACATCCACAATATGTCTAA | |
| | GGTCTTTCTTTGCAAATAATTTAATAGGCTAAGCCATAATTGGAG | |
| | TAGATCATAATTTGTAAGAAAATGCTTTATACTTAGAAAACTCAA | |
| | GAGAAAGAATCAACAACCATAATTGTTTTTGCTTTATTGTAGTCT | |
| | TTATAAAGTTTCTATACTTTGTATATACATGTCAACCAGCTAATG | |
| | ATAATAATAATTGGCTCAATAAATAAAACTGACTTACGACTGAGG | |
| | CCCTAGATAAAGAGGGTCTGAAAAGAAAAGCCTAAAGAATTAGCA | |
| | TGGCAATTAACATGATTGAGGTGCAACTCTTTAGGTTTGATTTAT | |
| | CCTGATTCATTTTGCTTACTTTGGCTCTGCCACAATCCACATGAT | |
| | CTTGGTCAAATAGATACTTGGATTCTCTAAGTCTCATTTAACTCT | |
| | AGCATCTTCCTCTTGGAGTTGTTGTGAGGTTTAAACGGTTTAATG | |
| | TAAGTCAAATATGCAAAACCAAGCCTAGCTCATTATATCACTCTA | |
| | CAATGATAGCTATCATTATCAACATCATCCTTACCTAATTCAGTC | |
| | AATTTAACTAAAATATTTTATACAGTTCTATGTATCCTAGATATC | |
| | CCTAAGGCATATTTTACTAACTCTCAGGCTCACAAATATTTTTCT | |
| | TTTCCATATATGTAAAGAAAGACATTAATGACAAAACAAACTGAC | |
| | CTTGTGGCAGTTAACCCCTTCTGCACCTTTAAAGCCTATTCAAGG | |
| | ACTCAAAGGCATTTACCTTCCAAAGTTATTCTATCGTAGCACAAA | |
| | AATCATAAATGCTAATTAACTGTTCCATAAGGAAATGTCCTCCAT | |
| | GTGAAAGGAATTCTGTCTCCAAACAAAACATTCATTAGAATGCAG | |
| | GGCCAATGCCTACTTTGTACAAATTCATTCGGTCAGCAAATAAAT | |
| | TAGACAGACCTTTATTATTTGCTAGATGTAGCTGTGAAGAAGGAT | |
| | CCAGCTATGTTTCTTATGAGACTAATGTCGAACTATGGGTTGTCA | |
| | CTGAGGATCCAGAGTTCCATAGGGCGTAGTCCTCACCTTCAAAGA | |
| | ATTCAGGGCTTAGTAGAAGAGTCTTACACAAATGACTAGAATGTA | |
| | GAACACAGAGTGGTTAGGACAAAGGAGCCAGGGATGGTTTTTGCT | |
| | GGGTTAGGGAATGAAAAAAGGGGAAGAAAATATGTGAAGTTATGT | |
| | GTGAGCTGATTCTTGAAATAAGCTGTTTTTATTTGCCTGCGTTCT | |
| | CTTATAATCCTTTTCCATAGGCTTCCATAATTTTTATTGAGCTGT | |
| | ATTTAAAGTTGAATAGATAATTCAACATTTCTCGTAAACTGTGCT | |
| | TCCTAAAAGAGTCCGTAGAGAATTTCAAATTTCTGCAGTCTTTAA | |
| | CTTGACCTGGTATTTCTATGTTAGATAATAACGTGACTTGTTTAT | |
| | TGCAGGCAAACATTATAACAATAAATTATTATTATTGTTTACATT | |
| | TGTAAGCACTAAGTATATGGCTTGTGCTTTGCATTCAGCATCCTT | |
| | TATCATTTAATCTTCACAACCACCTTAGAAGGAAGGTACTCTTTT | |
| | TATTTCCATCTTTTAAATGAGGAAATAAAAGCATAAAGAAGTTAA | |
| | TTAACTTACCTAGTGTCACACAGCTATTAAGAGGGGCTTACTATT | |
| | TGGATGCAAATATAGGCAGTTCTAATTCCAGAGCCTCTAATCTAA | |
| | GGCATTTAAAACCCCATCACCTTATCAAATAAGCTGTTTTTATTT | |
| | GCCCGTGTTCTCTTATAATCCTTATCCATAGGTTTCCATAATTTT | |
| | TATAAAATTGTATTTAAAATTTAAGTATAATCTTGGATGCCATCA | |
| | GGAAAATGAAAAACATTTTTACATTTGTGAAGGAAAAAGCCCACA | |
| | TCATTTCCAATATAGTTATTGAGTTAGTATTATCTAGACTATCTA | |
| | TTAGCAGCTAAGGATCTGAGGTCAAGGCCTGCCAGCCTGGCATTT | |
| | TACTTGACCACAACCTCCATGTGCACTAACCAGGCTGCTAAAAGA | |
| | ACATTAACGGGAACATAACCTGCTGGCTTGGTTGCCACAATTTTA | |
| | AAAAGACGTTAATAAATTAGAGAGCACTTAGAGGTTAGGAAATAA | |
| | TATGGTGGTAAAGATCTAGAAACAGTGTCATTCTGGGGCACTTGA | |
| | AGATGTTTAGCCTGGGGGAACAACTTGAAATGGAACATAACTGTT | |
| | TTCAAATACTTGAAAAATGGTGGTGCACCACAGAGAATGGCCTAA | |
| | TCATGGGTAGCTTCAGACTTCAAACAAGGATCAGTGGGCTAAAAC | |
| | CAGAGAGATGGAGTTTGGGACTCAAAGAATGCTCATCTGAAATTG | |
| | AGGGCTGACCAGCGAGGTTCTTTTAAAAATCATTGCATTTTACTA | |
| | AATTGTGAGTTCTGTAATTATAAATGTCCTAGCAGGTGCTAGCTG | |
| | TCATCTTTTCTATTATAAATTATACTATTTTATGTTATAATTTGT | |
| | ATTATACAGGCTTAAAACATAAGGGTCTGATAATCTGCTTATCTT | |
| | TAATACATAAGCCACTGATAGAAAATAAGTGGCTAACCATTCTTC | |
| | AGTTCTTTTTTTAATTGACAAAAATTGTATATGTTTGCGGTGTAT | |
| | GGCATATTTTGAAATATGTATACATTAGAGAATGGCTAAGTGAAG | |
| | CAAATTCACATATGCATTACCTCACACACCTGTCATTTATTTGTG | |
| | ATGAGAACAAAAAATCTACTCTTTCAGTGATTTTCAAGAATACAG | |
| | TACATTGTTATTAACAATAGTCAGCATGGTGTACAATAAGTCTTC | |
| | TGCGGCCGGGCGTGGTGGCTCACGCCTATAATCCCAGCACTTTGG | |
| | GAGGCCAAGGCTGGCAGATCACGAGGTCAGGAGTTCGAGACCAGC | |
| | CTGACCAACATGCTGAAACCTTGCCTCTACTAAAAATAGAAAAAT | |
| | TAGCTGAGTGTGGTGGTAAGCGCCTGTAGTCCCAGCTACTCAGGA | |
| | GGCTGAGGCAGGAGAATTGCTTGAACCTGGGAGGCGGAGGTTGCA | |
| | GTGAGTCGAGATAGTGCCACTGCACTCCAGCCTGGCAAAAGAGGG | |
| | AAACTCCGTCTCAATAATAAGTCTCTTGCATTTGTTCTTCCTGTT | |
| | TAACTGAAATTATGTATTCTTTGATCAACATCTCCCCAGTCTCCA | |
| | CCCCTAACCCCTGGTAACCACAATTCTACTCTGCTTCCGTGAGTT | |
| | CAACTTTATGAATAGTCCACATGTAAGTGAGATCATGTGGTATTT | |
| | GTCTTTCTGTGCCTAGCTTATTTCACTTAGCATAGTGTCCTCCAG | |
| | GTTCACCCATGTTGTCAAAAATGACAGGATTTCCCCCAACTTTTT | |
| | TAAGGCTGAACAGTATTCCATGTGTATGTGTATAAATTAGATTAG | |
| | TAGATGTTGCCACTCCCTCCTCCACCACAGTGGCTCTATCCCTGG | |
| | CTCCTGGCTCCAGCCGAGTACACTAGAGGAGGATATTCTAAACAG | |
| | CAACAACACAGGAGCAAAGACATTACAATGGGGTGTTGTCTTATT | |
| | GCCCCCATTAGACTGTAAGCATCTTGAAGACAAGGACCCCCATCA | |
| | CAGAGTGATGTTGTCATCCCTGGAGTGGGCACTGTGCATGATTGA | |
| | TGACTGGAAGCAATGAACATACAGAAGGGCAAAACAGAAATCAGC | |
| | AGGATGCTTTGCATTTCAGCATTGACTTTGCCAAATATGCCCAAC | |
| | TGTTCAGGGAGTTACATTGGTTCTAACGAAGCTCCTGTGATTCCT | |
| | AAGCACAGGAATGGTGATAATATATATAATGGTGCATGCATATAT | |
| | ACGCATATCTAGATAATGATATCTCATTATATGTGAGAACTGAAG | |
| | AACTCCGTTATGTTTCTCGTCTAACCAAAAAGGGCCTACAGCTAC | |
| | GATAATTTCCAAACAAATAAATCTGTGCTACTTGATTTTCATGCA | |
| | AAGCTCATATTTGTTCAAAAGGAAAATAAAGCTTAATTTAAAATC | |
| | AATTTAGGCTATTTTTATCTAAGTATGCTTACCGTTATTCAACTC | |
| | CCTGCAGATATTGTCAAATTTCTCAATATGGTAAATATTTATTCT | |
| | GTTAAAATATATCCATAGTTACACTAAAGACAGAGAGGTCTTATA | |
| | TGTTCTAAACAACATAGAGCAAATGCTCATAAACAGCATTTTATT | |
| | CCTATCTCCCGGAATAACAACGCTACTTCCAATTGCTGGAATCTA | |
| | AATTATTAAAATAAACCCATGCTGCAAGCTTTGTATGCTTAACAT | |
| | TCTCAAATGTTCACTTTTCAGATATGGAAGTGAAGCAAATCAACA | |
| | AACGTGCCTCTGGCCAGGCTTTTGAGCTGATCTTGAAGCCACCAT | |
| | CTCCTATCTCAGAAGCCCCACGAACTTTAGCTTCTCCAAAGAAGA | |
| | AAGACCTGTCCCTGGAGGAGATCCAGAAGAAACTGGAGGCTGCAG | |
| | AGGAAAGAAGAAAGGTAACTTTTTCCATAGGTTTTCCTTCTCTCT | |
| | CTCCCTCCCCTGCTCCTCCCTCTCACACACTCGGGCACACATGCA | |
| | CGCACACACACACACACACACACACACACACACACACACACACAC | |
| | ATACAGAGAGCAATGACAGCTGAACCTGTGCCATGCCAACATGTA | |
| | TAGGTTTTCAGTAGACACAGAGCCAGGCTAGTTGGGGTAAAAACT | |
| | GTAAGATAGATGCTAATTTTAGGCTAGCCAAACCAGAGCTCTCAG | |
| | AAATCCAAAGAGCTTCAGTGCTCTAGTGCCCCTTCCCGTATATTG | |
| | AATCCCCTTATTATAAAAGCCTCCCTTCCCTAGACCATCAGGCAG | |
| | AAGCACTGTAGAGAAAACACAGCCCTGGCGAACTCCAGTGGTGGG | |
| | GAGGGGAAGAAGTGCTGCTTCCTCCCTCTCAGGATCTGTGTCACC | |
| | CCCTTTGTCAGGCGTGGTTTTCCTTGGAATTACAAATTACCAGAT | |
| | CTTCCCTCCAAGATCTTTCCTGCCCAGGGTAAGGGCCAAGAGCTT | |
| | GCCCCTTTCCTCTTCAGAGTCCCACTGCCTGCCCTGGAAGTTGGT | |
| | CCTTCCAAGATCAGGACCTTCTCTGAGTTCTTTGAATATGTTCTT | |
| | TATCTTTTTCTAAGACTTGATGGGGATTTTTCTCTTTTTGCCATT | |
| | GGTCCCTGCTTATATTAAAGAGCTTTCCTTTTGCCAAATCTTTAC | |
| | TTTTCCATAATCACATGGCTAAGAAGAGCCAAGGGTATTATTTGA | |
| | GAACACTTAGAAATCCTAGGGACTGTGTACACAAACAGAAGTTGT | |
| | TTGAATGTGTCTGTTCCAACCATGTGGTTATGGTAGTTAATCCCA | |
| | TCAAGGTACTCACGATCATCCAAAAATGGAATTCTTTTATGTAAT | |
| | TCATCCCCACATTGTATTTCCCAATATTTTTTATGATATAATTTT | |
| | AGAATCAGGTAATCACTAAGAACATGTTCCCTGCACAGTTTTATG | |
| | ATGTTTTCTCTAAAAAGTCAGCCAAAACTTTGGACACTTCTATGT | |
| | TGGATAATTAAAAACAGAATGAAGATAATCCTCCTCCTAAAGATT | |
| | GAATTCTCCAAGAGAGAATGCAGGACAAACACAGATGTGCTGTGT | |
| | ATAGTATATGTGCATATATACATGCATATATGTACACAAATATGT | |
| | GTATTATCAAATAATGAGGCTCAAACATTAGAAATCCTTAGATTA | |
| | AATTTTCTAAACAAGAAAACACTAATCTTTGTAGTTGAAAAAAAA | |
| | TCCTCCTATGATATGTAATATGCTGATCTCAATTTTCACCTAAGA | |
| | GTGATGTTCTCCAAATGTCCGATGAGCATGTCATATATATATATA | |
| | TGAATTTTTATATATATAATTACAATGGTAATTGGTATATAGAGA | |
| | TATCTATATTATAGATATATATAGCTATCTCTATATATTACATAT | |
| | ACCAATTATAGATATAAATATAACAATGGTAACTGGTGTATATGT | |
| | GATGTGTATATATGTATATGTATACCATAATTATATATTAATATT | |
| | GTATATATGCCATAATTATATATTAATATTGGTATATATACACCA | |
| | TGATTATATATTAATATTGGTGTGTGTATGTGTGTGTGTATATAT | |
| | ATATATATATATAAAATACTAGTTATCATTGTTCTAGATTTAAAA | |
| | AACAGGAACCTGAGCTACTAACTCGACTATATATATATATATATA | |
| | TACAGGAAGTTGCTTTAAAACATTTTTATCAGCTTTTTTATTGTT | |
| | ATTTTTAGCTTTATTCTCATAGTAAAGCTAAAATAAATTATTCAA | |
| | CATTATCAAAACTTTGCTGCCAGCAGATGTAAGCAATACCTAAAA | |
| | CAGTGGAGAGCATGTTGCACCCAAAGCAGTTTAAGCTCTGACCCA | |
| | AGCACTGGCATCTTATAGGCACTGGGTAGAGATAAGAGTCATAGG | |
| | TCGACATATATTGAGATGCTATGACTTGATTAGAATATGGAGTCA | |
| | GTGACTGAGGTGAAATTAAAACTCAAACCACAATTCAACATCCTG | |
| | ATTTAGGATGTTGCTGGTGTTTCTAGGTACTACACTTAATTTGAA | |
| | AGAAATTATTGAGGATAAAAAAAGAACTGGGATCAACAAAATTAA | |
| | CTAGGTGTTCTTATAAGAGTCCCTGAGGTTACTAATTAATGAAAC | |
| | TGATAAAGCTCCTGCACCCTGACAGCAAGAAATTATCAATGATTA | |
| | TACATTTAAACAATTGAATTGAACTAGAAACTGGCCACATGGTTA | |
| | AAAGACATTTACAAATGTAATCATCCAGTGTTATGATGCCCAGAA | |
| | AAAAAAAATTCCTTAGAATGCTTTAAAAGCCGTATTCCATCACCT | |
| | TTCCAGT | |
| 455 | TAGCCGGACCCTTTGCCTTCGCCACTGCTCAGCGTCTGCACATCC | STMN2 |
| | CTACAATGGCTAAAACAGCAATGGGTAAGGCACTGCGCCTCGTTC | Exon 1 |
| | TCCGTCGGCTCTACCTGGAGCCCACCTCT | |
| 456 | AATCTTTCAAAACCTCCCTGGCTTAGAAAACCAAATTTTTGTAGA | STMN2 |
| | GAGAGATGGGTAGAATCTAATTTTATTCTAAAGCAATTAGCATTA | Exon 2 |
| | CATCATCACAGCAG | |
| 457 | GAGAAATTCAGAAAAAATGAAATATACTAATCTTCAGCTTTTCAT | STMN2 |
| | TTCAGCCTACAAGGAAAAAATGAAGGAGCTGTCCATGCTGTCACT | Exon 3 |
| | GATCTGCTCTTGCTTTTACCCGGAACCTCGCAACATCAACATCTA | |
| | TACTTACGATGGTGAGTAACCTAGGATAGACATACCCCTGCTAGC | |
| | TAGATCATTTGGAAAG | |
| 458 | CCATGCTGCAAGCTTTGTATGCTTAACATTCTCAAATGTTCACTT | STMN2 |
| | TTCAGATATGGAAGTGAAGCAAATCAACAAACGTGCCTCTGGCCA | Exon 4 |
| | GGCTTTTGAGCTGATCTTGAAGCCACCATCTCCTATCTCAGAAGC | |
| | CCCACGAACTTTAGCTTCTCCAAAGAAGAAAGACCTGTCCCTGGA | |
| | GGAGATCCAGAAGAAACTGGAGGCTGCAGAGGAAAGAAGAAAGGT | |
| | AACTTTTTCCATAGGTTTTCCTTCTCTCTCTCCCTCCCCTGCTCC | |
| | TCC | |
| 459 | CTAGGTTTGTGTTTGGATAATTATAAGATGGCTATGTTTTTCTTC | STMN2 |
| | CCCAGTCTCAGGAGGCCCAGGTGCTGAAACAATTGGCAGAGAAGA | Exon 5 |
| | GGGAACACGAGCGAGAAGTCCTTCAGAAGGCTTTGGAGGAGAACA | |
| | ACAACTTCAGCAAGATGGCGGAGGAAAAGCTGATCCTGAAAATGG | |
| | AACAAATTAAGGAAAACCGTGAGGCTAATCTAGCTGCTATTATTG | |
| | AACGTCTGCAGGAAAAGGTAATCTCAGCAGAGTCCTGAGCAGATG | |
| | GATATATTCATATGCAGCACAG | |
| 460 | TGTAGACTCCTTGAGATTAATAGAGTTTAACGATAAGTTTTACTT | STMN2 |
| | TATAGCTGGTCAAGTTTATTTCTTCTGAACTAAAAGAATCTATAG | Exon 6 |
| | AGTCTCAATTTCTGGAGCTTCAGAGGGAAGGAGAGAAGCAATGTA | |
| | AGCAACATTCTACAGAAATATAAATAATACTACTAATAATTAGCA | |
| | TC | |
| 461 | ACCAGACAAAAAGGGCCTGTGACATTTCTTCTTCCTTTTGTGTTT | STMN2 |
| | TTTAGGAGAGGCATGCTGCGGAGGTGCGCAGGAACAAGGAACTCC | Exon 7 |
| | AGGTTGAACTGTCTGGCTGAAGCAAGGGAGGGTCTGGCACGCCCC | |
| | ACCAATAGTAAATCCCCCTGCCTAT | |

[0153] In some embodiments, the gene editing system disclosed herein may comprise a Cas12i polypeptide as disclosed herein. In other embodiments, the gene editing system may comprise a nucleic acid encoding the Cas12i polypeptide. For example, the gene editing system may comprise a vector (e.g., a viral vector such as an AAV vector, such as AAV1, AAV2, AAV3, AAV4, AAV5, AAV6, AAV7, AAV8, AAV9, AAV10, AAV11 and AAV12) encoding the Cas12i polypeptide. Alternatively, the gene editing system may comprise a mRNA molecule encoding the Cas12i polypeptide. In some instances, the mRNA molecule may be codon-optimized.

### II. Preparation of Gene Editing System Components

[0154] The present disclosure provides methods for production of components of the gene editing systems disclosed herein, e.g., the RNA guide, methods for production of the Cas12i polypeptide, and methods for complexing the RNA guide and Cas12i polypeptide.

[0155] A. RNA Guide

[0156] In some embodiments, the RNA guide is made by in vitro transcription of a DNA molecule. Thus, for example, in some embodiments, the RNA guide is generated by in vitro transcription of a DNA molecule encoding the RNA guide using an upstream promoter sequence (e.g., a T7 polymerase promoter sequence).

[0157] In some embodiments, the DNA molecule encodes multiple RNA guides or the in vitro transcription reaction includes multiple different DNA molecules, each encoding a different RNA guide. In some embodiments, the RNA guide is made using chemical synthetic methods. In some embodiments, the RNA guide is made by expressing the RNA guide sequence in cells transfected with a plasmid including sequences that encode the RNA guide. In some embodiments, the plasmid encodes multiple different RNA guides. In some embodiments, multiple different plasmids, each encoding a different RNA guide, are transfected into the cells. In some embodiments, the RNA guide is expressed from a plasmid that encodes the RNA guide and also encodes a Cas12i polypeptide. In some embodiments, the RNA guide is expressed from a plasmid that expresses the RNA guide but not a Cas12i polypeptide. In some embodiments, the RNA guide is purchased from a commercial vendor. In some embodiments, the RNA guide is synthesized using one or more modified nucleotide, e.g., as described above.

[0158] B. Cas12i Polypeptide

[0159] In some embodiments, the Cas12i polypeptide of the present disclosure can be prepared by (a) culturing bacteria which produce the Cas12i polypeptide of the present disclosure, isolating the Cas12i polypeptide, optionally, purifying the Cas12i polypeptide, and complexing the Cas12i polypeptide with an RNA guide. The Cas12i polypeptide can be also prepared by (b) a known genetic engineering technique, specifically, by isolating a gene encoding the Cas12i polypeptide of the present disclosure from bacteria, constructing a recombinant expression vector, and then transferring the vector into an appropriate host cell that expresses the RNA guide for expression of a recombinant protein that complexes with the RNA guide in the host cell. Alternatively, the Cas12i polypeptide can be prepared by (c) an in vitro coupled transcription-translation system and then complexing with an RNA guide.

[0160] In some embodiments, a host cell is used to express the Cas12i polypeptide. The host cell is not particularly limited, and various known cells can be preferably used. Specific examples of the host cell include bacteria such as E. coli, yeasts (budding yeast, Saccharomyces cerevisiae, and fission yeast, Schizosaccharomyces pombe), nematodes (Caenorhabditis elegans), Xenopus laevis oocytes, and animal cells (for example, CHO cells, COS cells and HEK293 cells). The method for transferring the expression vector described above into host cells, i.e., the transformation method, is not particularly limited, and known methods such as electroporation, the calcium phosphate method, the liposome method and the DEAE dextran method can be used.

[0161] After a host is transformed with the expression vector, the host cells may be cultured, cultivated or bred, for production of the Cas12i polypeptide. After expression of the Cas12i polypeptide, the host cells can be collected and Cas12i polypeptide purified from the cultures etc. according to conventional methods (for example, filtration, centrifugation, cell disruption, gel filtration chromatography, ion exchange chromatography, etc.).

[0162] In some embodiments, the methods for Cas12i polypeptide expression comprises translation of at least 5 amino acids, at least 10 amino acids, at least 15 amino acids, at least 20 amino acids, at least 50 amino acids, at least 100 amino acids, at least 150 amino acids, at least 200 amino acids, at least 250 amino acids, at least 300 amino acids, at least 400 amino acids, at least 500 amino acids, at least 600 amino acids, at least 700 amino acids, at least 800 amino acids, at least 900 amino acids, or at least 1000 amino acids of the Cas12i polypeptide. In some embodiments, the methods for protein expression comprises translation of about 5 amino acids, about 10 amino acids, about 15 amino acids, about 20 amino acids, about 50 amino acids, about 100 amino acids, about 150 amino acids, about 200 amino acids, about 250 amino acids, about 300 amino acids, about 400 amino acids, about 500 amino acids, about 600 amino acids, about 700 amino acids, about 800 amino acids, about 900 amino acids, about 1000 amino acids or more of the Cas12i polypeptide.

[0163] A variety of methods can be used to determine the level of production of a Cas12i polypeptide in a host cell. Such methods include, but are not limited to, for example, methods that utilize either polyclonal or monoclonal antibodies specific for the Cas12i polypeptide or a labeling tag as described elsewhere herein. Exemplary methods include, but are not limited to, enzyme-linked immunosorbent assays (ELISA), radioimmunoassays (MA), fluorescent immunoassays (FIA), and fluorescent activated cell sorting (FACS). These and other assays are well known in the art (See, e.g., Maddox et al., J. Exp. Med. 158:1211 [1983]).

[0164] The present disclosure provides methods of in vivo expression of the Cas12i polypeptide in a cell, comprising providing a polyribonucleotide encoding the Cas12i polypeptide to a host cell wherein the polyribonucleotide encodes the Cas12i polypeptide, expressing the Cas12i polypeptide in the cell, and obtaining the Cas12i polypeptide from the cell.

[0165] The present disclosure further provides methods of in vivo expression of a Cas12i polypeptide in a cell, comprising providing a polyribonucleotide encoding the Cas12i polypeptide to a host cell wherein the polyribonucleotide encodes the Cas12i polypeptide and expressing the Cas12i polypeptide in the cell. In some embodiments, the polyribonucleotide encoding the Cas12i polypeptide is delivered to the cell with an RNA guide and, once expressed in the cell, the Cas12i polypeptide and the RNA guide form a complex. In some embodiments, the polyribonucleotide encoding the Cas12i polypeptide and the RNA guide are delivered to the cell within a single composition. In some embodiments, the polyribonucleotide encoding the Cas12i polypeptide and the RNA guide are comprised within separate compositions. In some embodiments, the host cell is present in a subject, e.g., a human patient.

[0166] C. Complexes

[0167] In some embodiments, an RNA guide targeting STMN2 is complexed with a Cas12i polypeptide to form a ribonucleoprotein (RNP). In some embodiments, complexation of the RNA guide and Cas12i polypeptide occurs at a temperature lower than about any one of 20° C., 21° C., 22° C., 23° C., 24° C., 25° C., 26° C., 27° C., 28° C., 29° C., 30° C., 31° C., 32° C., 33° C., 34° C., 35° C., 36° C., 37° C., 38° C., 39° C., 40° C., 41° C., 42° C., 43° C., 44° C., 45° C., 50° C., or 55° C. In some embodiments, the RNA guide does not dissociate from the Cas12i polypeptide at about 37° C. over an incubation period of at least about any one of 10 mins, 15 mins, 20 mins, 25 mins, 30 mins, 35 mins, 40 mins, 45 mins, 50 mins, 55 mins, 1 hr, 2 hr, 3 hr, 4 hr, or more hours.

[0168] In some embodiments, the RNA guide and Cas12i polypeptide are complexed in a complexation buffer. In some embodiments, the Cas12i polypeptide is stored in a buffer that is replaced with a complexation buffer to form a complex with the RNA guide. In some embodiments, the Cas12i polypeptide is stored in a complexation buffer.

[0169] In some embodiments, the complexation buffer has a pH in a range of about 7.3 to 8.6. In one embodiment, the pH of the complexation buffer is about 7.3. In one embodiment, the pH of the complexation buffer is about 7.4. In one embodiment, the pH of the complexation buffer is about 7.5. In one embodiment, the pH of the complexation buffer is about 7.6. In one embodiment, the pH of the complexation buffer is about 7.7. In one embodiment, the pH of the complexation buffer is about 7.8. In one embodiment, the pH of the complexation buffer is about 7.9. In one embodiment, the pH of the complexation buffer is about 8.0. In one embodiment, the pH of the complexation buffer is about 8.1. In one embodiment, the pH of the complexation buffer is about 8.2. In one embodiment, the pH of the complexation buffer is about 8.3. In one embodiment, the pH of the complexation buffer is about 8.4. In one embodiment, the pH of the complexation buffer is about 8.5. In one embodiment, the pH of the complexation buffer is about 8.6.

[0170] In some embodiments, the Cas12i polypeptide can be overexpressed and complexed with the RNA guide in a host cell prior to purification as described herein. In some embodiments, mRNA or DNA encoding the Cas12i polypeptide is introduced into a cell so that the Cas12i polypeptide is expressed in the cell. In some embodiments, the RNA guide is also introduced into the cell, whether simultaneously, separately, or sequentially from a single mRNA or DNA construct, such that the RNP complex is formed in the cell.

[0171] III. Genetic Editing Methods

[0172] The present disclosure also provides methods of modifying a target site within the STMN2 gene. In some embodiments, the methods comprise introducing a STMN2-targeting RNA guide and a Cas12i polypeptide into a cell. The STMN2-targeting RNA guide and Cas12i polypeptide can be introduced as a ribonucleoprotein complex into a cell. The STMN2-targeting RNA guide and Cas12i polypeptide can be introduced on a nucleic acid vector. The Cas12i polypeptide can be introduced as an mRNA. The RNA guide and template DNA can be introduced directly into the cell. In some embodiments, the composition described herein is delivered to a cell/tissue/person to reduce STMN2 in the cell/tissue/person. In some embodiments, the composition described herein is delivered to a cell/tissue/person to reduce STMN2 production in the cell/tissue/person. In some embodiments, the composition described herein is delivered to a cell/tissue/person to treat a neurodegenerative disease (e.g., amyotrophic lateral sclerosis (ALS) or frontotemporal dementia (FTD)) in a cell/tissue/person. In some embodiments, the composition described herein is delivered to a person with a neurodegenerative disease (e.g., amyotrophic lateral sclerosis (ALS) or frontotemporal dementia (FTD)).

[0173] Any of the gene editing systems disclosed herein may be used to genetically engineered a STMN2 gene. The gene editing system may comprise a guide RNA, a Cas12i2 polypeptide, and a template DNA. The guide RNA comprises a spacer sequence specific to a target sequence in the STMN2 gene, e.g., specific to a region in exon 1, exon 2, exon 3, exon 4, exon 5, exon 6, exon 7, or an intron of the STMN2 gene.

[0174] A. Target Sequences

[0175] In some embodiments, an RNA guide as disclosed herein is designed to be complementary to a target sequence that is adjacent to a 5′-TTN-3′ PAM sequence or 5′-NTTN-3′ PAM sequence.

[0176] In some embodiments, the target sequence is within a STMN2 gene or a locus of a STMN2 gene (e.g., exon 1, exon 2, exon 3, exon 4, exon 5, exon 6, exon 7, or an intron), to which the RNA guide can bind via base pairing. In some embodiments, a cell has only one copy of the target sequence. In some embodiments, a cell has more than one copy, such as at least about any one of 2, 3, 4, 5, 10, 100, or more copies of the target sequence.

[0177] In some embodiments, the STMN2 gene is a mammalian gene. In some embodiments, the STMN2 gene is a human gene. For example, in some embodiments, the target sequence is within the sequence of SEQ ID NO: 454, or the reverse complement thereof. In some embodiments, the target sequence is within an exon of the STMN2 gene set forth in SEQ ID NO: 454, or the reverse complement thereof, e.g., within a sequence of any one of SEQ ID NOs: 455-461 (or a reverse complement of any thereof). Target sequences within an exon region of the STMN2 gene of SEQ ID NO: 454 are set forth in Table 6. The exon sequences are set forth in Table 7. In some embodiments, the target sequence is within an intron of the STMN2 gene set forth in SEQ ID NO: 454, or the reverse complement thereof. In some embodiments, the target sequence is within a variant (e.g., a polymorphic variant) of the STMN2 gene sequence set forth in SEQ ID NO: 454, or the reverse complement thereof. In some embodiments, the STMN2 gene sequence is a homolog of the sequence set forth in SEQ ID NO: 454, or the reverse complement thereof. In some embodiments, the STMN2 gene sequence is a non-human STMN2 sequence.

[0178] In some embodiments, the target sequence is adjacent to a 5′-NTTN-3′ PAM sequence, wherein N is any nucleotide. The 5′-NTTN-3′ sequence may be immediately adjacent to the target sequence or, for example, within a small number (e.g., 1, 2, 3, 4, or 5) of nucleotides of the target sequence. In some embodiments the 5′-NTTN-3′ sequence is 5′-NTTY-3′, 5′-NTTC-3′, 5′-NTTT-3′, 5′-NTTA-3′, 5′-NTTB-3′, 5′-NTTG-3′, 5′-CTTY-3′, 5′-DTTR′3′, 5′-CTTR-3′, 5′-DTTT-3′, 5′-ATTN-3′, or 5′-GTTN-3′, wherein Y is C or T, B is any nucleotide except for A, D is any nucleotide except for C, and R is A or G. In some embodiments, the 5′-NTTN-3′ sequence is 5′-ATTA-3′, 5′-ATTT-3′, 5′-ATTG-3′, 5′-ATTC-3′, 5′-TTTA-3′, 5′-TTTT-3′, 5′-TTTG-3′, 5′-TTTC-3′, 5′-GTTA-3′, 5′-GTTT-3′, 5′-GTTG-3′, 5′-GTTC-3′, 5′-CTTA-3′, 5′-CTTT-3′, 5′-CTTG-3′, or 5′-CTTC-3′. The PAM sequence may be 5′ to the target sequence.

[0179] In some embodiments, the target sequence is single-stranded (e.g., single-stranded DNA). In some embodiments, the target sequence is double-stranded (e.g., double-stranded DNA). In some embodiments, the target sequence comprises both single-stranded and double-stranded regions. In some embodiments, the target sequence is linear. In some embodiments, the target sequence is circular. In some embodiments, the target sequence comprises one or more modified nucleotides, such as methylated nucleotides, damaged nucleotides, or nucleotides analogs. In some embodiments, the target sequence is not modified. In some embodiments, the RNA guide binds to a first strand of a double-stranded target sequence (e.g., the target strand or the spacer-complementary strand), and the 5′-NTTN-3′ PAM sequence is present in the second, complementary strand (e.g., the non-target strand or the non-spacer-complementary strand). In some embodiments, the RNA guide binds adjacent to a 5′-NAAN-3′ sequence on the target strand (e.g., the spacer-complementary strand).

[0180] The 5′-NTTN-3′ sequence may be immediately adjacent to the target sequence or, for example, within a small number (e.g., 1, 2, 3, 4, or 5) of nucleotides of the target sequence. In some embodiments the 5′-NTTN-3′ sequence is 5′-NTTY-3′, 5′-NTTC-3′, 5′-NTTT-3′, 5′-NTTA-3′, 5′-NTTB-3′, 5′-NTTG-3′, 5′-CTTY-3′, 5′-DTTR-3′, 5′-CTTR-3′, 5′-DTTT-3′, 5′-ATTN-3′, or 5′-GTTN-3′, wherein Y is C or T, B is any nucleotide except for A, D is any nucleotide except for C, and R is A or G. In some embodiments, the 5′-NTTN-3′ sequence is 5′-ATTA-3′, 5′-ATTT-3′, 5′-ATTG-3′, 5′-ATTC-3′, 5′-TTTA-3′, 5′-TTTT-3′, 5′-TTTG-3′, 5′-TTTC-3′, 5′-GTTA-3′, 5′-GTTT-3′, 5′-GTTG-3′, 5′-GTTC-3′, 5′-CTTA-3′, 5′-CTTT-3′, 5′-CTTG-3′, or 5′-CTTC-3′. In some embodiments, the RNA guide is designed to bind to a first strand of a double-stranded target nucleic acid (i.e., the non-PAM strand), and the 5′-NTTN-3′ PAM sequence is present in the second, complementary strand (i.e., the PAM strand). In some embodiments, the RNA guide binds to a region on the non-PAM strand that is complementary to a target sequence on the PAM strand, which is adjacent to a 5′-NAAN-3′ sequence.

[0181] In some embodiments, the target sequence is present in a cell. In some embodiments, the target sequence is present in the nucleus of the cell. In some embodiments, the target sequence is endogenous to the cell. In some embodiments, the target sequence is a genomic DNA. In some embodiments, the target sequence is a chromosomal DNA. In some embodiments, the target sequence is a protein-coding gene or a functional region thereof, such as a coding region, or a regulatory element, such as a promoter, enhancer, a 5′ or 3′ untranslated region, etc. In some embodiments, the target sequence is present in a readily accessible region of the target sequence. In some embodiments, the target sequence is in an exon of a target gene. In some embodiments, the target sequence is across an exon-intron junction of a target gene. In some embodiments, the target sequence is present in a non-coding region, such as a regulatory region of a gene.

[0182] B. Gene Editing

[0183] In some embodiments, the Cas12i polypeptide has enzymatic activity (e.g., nuclease activity). In some embodiments, the Cas12i polypeptide induces one or more DNA double-stranded breaks in the cell. In some embodiments, the Cas12i polypeptide induces one or more DNA single-stranded breaks in the cell. In some embodiments, the Cas12i polypeptide induces one or more DNA nicks in the cell. In some embodiments, DNA breaks and/or nicks result in formation of one or more indels (e.g., one or more deletions).

[0184] In some embodiments, an RNA guide disclosed herein forms a complex with the Cas12i polypeptide and directs the Cas12i polypeptide to a target sequence adjacent to a 5′-NTTN-3′ sequence. In some embodiments, the complex induces a deletion (e.g., a nucleotide deletion or DNA deletion) adjacent to the 5′-NTTN-3′ sequence. In some embodiments, the complex induces a deletion adjacent to a 5′-ATTA-3′, 5′-ATTT-3′, 5′-ATTG-3′, 5′-ATTC-3′, 5′-TTTA-3′, 5′-TTTT-3′, 5′-TTTG-3′, 5′-TTTC-3′, 5′-GTTA-3′, 5′-GTTT-3′, 5′-GTTG-3′, 5′-GTTC-3′, 5′-CTTA-3′, 5′-CTTT-3′, 5′-CTTG-3′, or 5′-CTTC-3′ sequence. In some embodiments, the complex induces a deletion adjacent to a T/C-rich sequence.

[0185] In some embodiments, the deletion is downstream of a 5′-NTTN-3′ sequence. In some embodiments, the deletion is downstream of a 5′-ATTA-3′, 5′-ATTT-3′, 5′-ATTG-3′, 5′-ATTC-3′, 5′-TTTA-3′, 5′-TTTT-3′, 5′-TTTG-3′, 5′-TTTC-3′, 5′-GTTA-3′, 5′-GTTT-3′, 5′-GTTG-3′, 5′-GTTC-3′, 5′-CTTA-3′, 5′-CTTT-3′, 5′-CTTG-3′, or 5′-CTTC-3′ sequence. In some embodiments, the deletion is downstream of a T/C-rich sequence.

[0186] In some embodiments, the deletion alters expression of the STMN2 gene. In some embodiments, the deletion alters function of the STMN2 gene. In some embodiments, the deletion inactivates the STMN2 gene. In some embodiments, the deletion is a frameshifting deletion. In some embodiments, the deletion is a non-frameshifting deletion. In some embodiments, the deletion leads to cell toxicity or cell death (e.g., apoptosis).

[0187] In some embodiments, the deletion starts within about 5 to about 15 nucleotides (e.g., about 3, 4, 5, 6, 7, 8, 9, 10, 11, 12, 13, 14, 15, 16, or 17 nucleotides) of the 5′-NTTN-3′ sequence. In some embodiments, the deletion starts within about 5 to about 15 nucleotides (e.g., about 3, 4, 5, 6, 7, 8, 9, 10, 11, 12, 13, 14, 15, 16, or 17 nucleotides) of a 5′-ATTA-3′, 5′-ATTT-3′, 5′-ATTG-3′, 5′-ATTC-3′, 5′-TTTA-3′, 5′-TTTT-3′, 5′-TTTG-3′, 5′-TTTC-3′, 5′-GTTA-3′, 5′-GTTT-3′, 5′-GTTG-3′, 5′-GTTC-3′, 5′-CTTA-3′, 5′-CTTT-3′, 5′-CTTG-3′, or 5′-CTTC-3′ sequence. In some embodiments, the deletion starts within about 5 to about 15 nucleotides (e.g., about 3, 4, 5, 6, 7, 8, 9, 10, 11, 12, 13, 14, 15, 16, or 17 nucleotides) of a T/C-rich sequence.

[0188] In some embodiments, the deletion starts within about 5 to about 15 nucleotides (e.g., about 3, 4, 5, 6, 7, 8, 9, 10, 11, 12, 13, 14, 15, 16, or 17 nucleotides) downstream of the 5′-NTTN-3′ sequence. In some embodiments, the deletion starts within about 5 to about 15 nucleotides (e.g., about 3, 4, 5, 6, 7, 8, 9, 10, 11, 12, 13, 14, 15, 16, or 17 nucleotides) downstream of a 5′-ATTA-3′, 5′-ATTT-3′, 5′-ATTG-3′, 5′-ATTC-3′, 5′-TTTA-3′, 5′-TTTT-3′, 5′-TTTG-3′, 5′-TTTC-3′, 5′-GTTA-3′, 5′-GTTT-3′, 5′-GTTG-3′, 5′-GTTC-3′, 5′-CTTA-3′, 5′-CTTT-3′, 5′-CTTG-3′, or 5′-CTTC-3′ sequence. In some embodiments, the deletion starts within about 5 to about 15 nucleotides (e.g., about 3, 4, 5, 6, 7, 8, 9, 10, 11, 12, 13, 14, 15, 16, or 17 nucleotides) downstream of a T/C-rich sequence.

[0189] In some embodiments, the deletion starts within about 5 to about 10 nucleotides (e.g., about 3, 4, 5, 6, 7, 8, 9, 10, 11, or 12 nucleotides) of the 5′-NTTN-3′ sequence. In some embodiments, the deletion starts within about 5 to about 10 nucleotides (e.g., about 3, 4, 5, 6, 7, 8, 9, 10, 11, or 12 nucleotides) of a 5′-ATTA-3′, 5′-ATTT-3′, 5′-ATTG-3′, 5′-ATTC-3′, 5′-TTTA-3′, 5′-TTTT-3′, 5′-TTTG-3′, 5′-TTTC-3′, 5′-GTTA-3′, 5′-GTTT-3′, 5′-GTTG-3′, 5′-GTTC-3′, 5′-CTTA-3′, 5′-CTTT-3′, 5′-CTTG-3′, or 5′-CTTC-3′ sequence. In some embodiments, the deletion starts within about 5 to about 10 nucleotides (e.g., about 3, 4, 5, 6, 7, 8, 9, 10, 11, or 12 nucleotides) of a T/C-rich sequence.

[0190] In some embodiments, the deletion starts within about 5 to about 10 nucleotides (e.g., about 3, 4, 5, 6, 7, 8, 9, 10, 11, or 12 nucleotides) downstream of the 5′-NTTN-3′ sequence. In some embodiments, the deletion starts within about 5 to about 10 nucleotides (e.g., about 3, 4, 5, 6, 7, 8, 9, 10, 11, or 12 nucleotides) downstream of a 5′-ATTA-3′, 5′-ATTT-3′, 5′-ATTG-3′, 5′-ATTC-3′, 5′-TTTA-3′, 5′-TTTT-3′, 5′-TTTG-3′, 5′-TTTC-3′, 5′-GTTA-3′, 5′-GTTT-3′, 5′-GTTG-3′, 5′-GTTC-3′, 5′-CTTA-3′, 5′-CTTT-3′, 5′-CTTG-3′, or 5′-CTTC-3′ sequence. In some embodiments, the deletion starts within about 5 to about 10 nucleotides (e.g., about 3, 4, 5, 6, 7, 8, 9, 10, 11, or 12 nucleotides) downstream of a T/C-rich sequence.

[0191] In some embodiments, the deletion starts within about 10 to about 15 nucleotides (e.g., about 8, 9, 10, 11, 12, 13, 14, 15, 16, or 17 nucleotides) of the 5′-NTTN-3′ sequence. In some embodiments, the deletion starts within about 10 to about 15 nucleotides (e.g., about 8, 9, 10, 11, 12, 13, 14, 15, 16, or 17 nucleotides) of a 5′-ATTA-3′, 5′-ATTT-3′, 5′-ATTG-3′, 5′-ATTC-3′, 5′-TTTA-3′, 5′-TTTT-3′, 5′-TTTG-3′, 5′-TTTC-3′, 5′-GTTA-3′, 5′-GTTT-3′, 5′-GTTG-3′, 5′-GTTC-3′, 5′-CTTA-3′, 5′-CTTT-3′, 5′-CTTG-3′, or 5′-CTTC-3′ sequence. In some embodiments, the deletion starts within about 10 to about 15 nucleotides (e.g., about 8, 9, 10, 11, 12, 13, 14, 15, 16, or 17 nucleotides) of a T/C-rich sequence.

[0192] In some embodiments, the deletion starts within about 10 to about 15 nucleotides (e.g., about 8, 9, 10, 11, 12, 13, 14, 15, 16, or 17 nucleotides) downstream of the 5′-NTTN-3′ sequence. In some embodiments, the deletion starts within about 10 to about 15 nucleotides (e.g., about 8, 9, 10, 11, 12, 13, 14, 15, 16, or 17 nucleotides) downstream of a 5′-ATTA-3′, 5′-ATTT-3′, 5′-ATTG-3′, 5′-ATTC-3′, 5′-TTTA-3′, 5′-TTTT-3′, 5′-TTTG-3′, 5′-TTTC-3′, 5′-GTTA-3′, 5′-GTTT-3′, 5′-GTTG-3′, 5′-GTTC-3′, 5′-CTTA-3′, 5′-CTTT-3′, 5′-CTTG-3′, or 5′-CTTC-3′ sequence. In some embodiments, the deletion starts within about 10 to about 15 nucleotides (e.g., about 8, 9, 10, 11, 12, 13, 14, 15, 16, or 17 nucleotides) downstream of a T/C-rich sequence.

[0193] In some embodiments, the deletion ends within about 20 to about 30 nucleotides (e.g., about 17, 18, 19, 20, 21, 22, 23, 24, 25, 26, 27, 28, 29, 30, 31, 32, or 33 nucleotides) of the 5′-NTTN-3′ sequence. In some embodiments, the deletion ends within about 20 to about 30 nucleotides (e.g., about 17, 18, 19, 20, 21, 22, 23, 24, 25, 26, 27, 28, 29, 30, 31, 32, or 33 nucleotides) of a 5′-ATTA-3′, 5′-ATTT-3′, 5′-ATTG-3′, 5′-ATTC-3′, 5′-TTTA-3′, 5′-TTTT-3′, 5′-TTTG-3′, 5′-TTTC-3′, 5′-GTTA-3′, 5′-GTTT-3′, 5′-GTTG-3′, 5′-GTTC-3′, 5′-CTTA-3′, 5′-CTTT-3′, 5′-CTTG-3′, or 5′-CTTC-3′ sequence. In some embodiments, the deletion ends within about 20 to about 30 nucleotides (e.g., about 17, 18, 19, 20, 21, 22, 23, 24, 25, 26, 27, 28, 29, 30, 31, 32, or 33 nucleotides) of a T/C-rich sequence.

[0194] In some embodiments, the deletion ends within about 20 to about 30 nucleotides (e.g., about 17, 18, 19, 20, 21, 22, 23, 24, 25, 26, 27, 28, 29, 30, 31, 32, or 33 nucleotides) downstream of the 5′-NTTN-3′ sequence. In some embodiments, the deletion ends within about 20 to about 30 nucleotides (e.g., about 17, 18, 19, 20, 21, 22, 23, 24, 25, 26, 27, 28, 29, 30, 31, 32, or 33 nucleotides) downstream of a 5′-ATTA-3′, 5′-ATTT-3′, 5′-ATTG-3′, 5′-ATTC-3′, 5′-TTTA-3′, 5′-TTTT-3′, 5′-TTTG-3′, 5′-TTTC-3′, 5′-GTTA-3′, 5′-GTTT-3′, 5′-GTTG-3′, 5′-GTTC-3′, 5′-CTTA-3′, 5′-CTTT-3′, 5′-CTTG-3′, or 5′-CTTC-3′ sequence. In some embodiments, the deletion ends within about 20 to about 30 nucleotides (e.g., about 17, 18, 19, 20, 21, 22, 23, 24, 25, 26, 27, 28, 29, 30, 31, 32, or 33 nucleotides) downstream of a T/C-rich sequence.

[0195] In some embodiments, the deletion ends within about 20 to about 25 nucleotides (e.g., about 17, 18, 19, 20, 21, 22, 23, 24, 25, 26, 27, or 28 nucleotides) of the 5′-NTTN-3′ sequence. In some embodiments, the deletion ends within about 20 to about 25 nucleotides (e.g., about 17, 18, 19, 20, 21, 22, 23, 24, 25, 26, 27, or 28 nucleotides) of a 5′-ATTA-3′, 5′-ATTT-3′, 5′-ATTG-3′, 5′-ATTC-3′, 5′-TTTA-3′, 5′-TTTT-3′, 5′-TTTG-3′, 5′-TTTC-3′, 5′-GTTA-3′, 5′-GTTT-3′, 5′-GTTG-3′, 5′-GTTC-3′, 5′-CTTA-3′, 5′-CTTT-3′, 5′-CTTG-3′, or 5′-CTTC-3′ sequence. In some embodiments, the deletion ends within about 20 to about 25 nucleotides (e.g., about 17, 18, 19, 20, 21, 22, 23, 24, 25, 26, 27, or 28 nucleotides) of a T/C-rich sequence.

[0196] In some embodiments, the deletion ends within about 20 to about 25 nucleotides (e.g., about 17, 18, 19, 20, 21, 22, 23, 24, 25, 26, 27, or 28 nucleotides) downstream of the 5′-NTTN-3′ sequence. In some embodiments, the deletion ends within about 20 to about 25 nucleotides (e.g., about 17, 18, 19, 20, 21, 22, 23, 24, 25, 26, 27, or 28 nucleotides) downstream of a 5′-ATTA-3′, 5′-ATTT-3′, 5′-ATTG-3′, 5′-ATTC-3′, 5′-TTTA-3′, 5′-TTTT-3′, 5′-TTTG-3′, 5′-TTTC-3′, 5′-GTTA-3′, 5′-GTTT-3′, 5′-GTTG-3′, 5′-GTTC-3′, 5′-CTTA-3′, 5′-CTTT-3′, 5′-CTTG-3′, or 5′-CTTC-3′ sequence. In some embodiments, the deletion ends within about 20 to about 25 nucleotides (e.g., about 17, 18, 19, 20, 21, 22, 23, 24, 25, 26, 27, or 28 nucleotides) downstream of a T/C-rich sequence.

[0197] In some embodiments, the deletion ends within about 25 to about 30 nucleotides (e.g., about 22, 23, 24, 25, 26, 27, 28, 29, 30, 31, 32, or 33 nucleotides) of the 5′-NTTN-3′ sequence. In some embodiments, the deletion ends within about 25 to about 30 nucleotides (e.g., about 22, 23, 24, 25, 26, 27, 28, 29, 30, 31, 32, or 33 nucleotides) of a 5′-ATTA-3′, 5′-ATTT-3′, 5′-ATTG-3′, 5′-ATTC-3′, 5′-TTTA-3′, 5′-TTTT-3′, 5′-TTTG-3′, 5′-TTTC-3′, 5′-GTTA-3′, 5′-GTTT-3′, 5′-GTTG-3′, 5′-GTTC-3′, 5′-CTTA-3′, 5′-CTTT-3′, 5′-CTTG-3′, or 5′-CTTC-3′ sequence. In some embodiments, the deletion ends within about 25 to about 30 nucleotides (e.g., about 22, 23, 24, 25, 26, 27, 28, 29, 30, 31, 32, or 33 nucleotides) of a T/C-rich sequence.

[0198] In some embodiments, the deletion ends within about 25 to about 30 nucleotides (e.g., about 22, 23, 24, 25, 26, 27, 28, 29, 30, 31, 32, or 33 nucleotides) downstream of the 5′-NTTN-3′ sequence. In some embodiments, the deletion ends within about 25 to about 30 nucleotides (e.g., about 22, 23, 24, 25, 26, 27, 28, 29, 30, 31, 32, or 33 nucleotides) downstream of a 5′-ATTA-3′, 5′-ATTT-3′, 5′-ATTG-3′, 5′-ATTC-3′, 5′-TTTA-3′, 5′-TTTT-3′, 5′-TTTG-3′, 5′-TTTC-3′, 5′-GTTA-3′, 5′-GTTT-3′, 5′-GTTG-3′, 5′-GTTC-3′, 5′-CTTA-3′, 5′-CTTT-3′, 5′-CTTG-3′, or 5′-CTTC-3′ sequence. In some embodiments, the deletion ends within about 25 to about 30 nucleotides (e.g., about 22, 23, 24, 25, 26, 27, 28, 29, 30, 31, 32, or 33 nucleotides) downstream of a T/C-rich sequence.

[0199] In some embodiments, the deletion starts within about 5 to about 15 nucleotides (e.g., about 3, 4, 5, 6, 7, 8, 9, 10, 11, 12, 13, 14, 15, 16, or 17 nucleotides) and ends within about 20 to about 30 nucleotides (e.g., about 17, 18, 19, 20, 21, 22, 23, 24, 25, 26, 27, 28, 29, 30, 31, 32, or 33 nucleotides) of the 5′-NTTN-3′ sequence. In some embodiments, the deletion starts within about 5 to about 15 nucleotides (e.g., about 3, 4, 5, 6, 7, 8, 9, 10, 11, 12, 13, 14, 15, 16, or 17 nucleotides) and ends within about 20 to about 30 nucleotides (e.g., about 17, 18, 19, 20, 21, 22, 23, 24, 25, 26, 27, 28, 29, 30, 31, 32, or 33 nucleotides) of a 5′-ATTA-3′, 5′-ATTT-3′, 5′-ATTG-3′, 5′-ATTC-3′, 5′-TTTA-3′, 5′-TTTT-3′, 5′-TTTG-3′, 5′-TTTC-3′, 5′-GTTA-3′, 5′-GTTT-3′, 5′-GTTG-3′, 5′-GTTC-3′, 5′-CTTA-3′, 5′-CTTT-3′, 5′-CTTG-3′, or 5′-CTTC-3′ sequence. In some embodiments, the deletion starts within about 5 to about 15 nucleotides (e.g., about 3, 4, 5, 6, 7, 8, 9, 10, 11, 12, 13, 14, 15, 16, or 17 nucleotides) and ends within about 20 to about 30 nucleotides (e.g., about 17, 18, 19, 20, 21, 22, 23, 24, 25, 26, 27, 28, 29, 30, 31, 32, or 33 nucleotides) of a T/C-rich sequence.

[0200] In some embodiments, the deletion starts within about 5 to about 15 nucleotides (e.g., about 3, 4, 5, 6, 7, 8, 9, 10, 11, 12, 13, 14, 15, 16, or 17 nucleotides) downstream of the 5′-NTTN-3′ sequence and ends within about 20 to about 30 nucleotides (e.g., about 17, 18, 19, 20, 21, 22, 23, 24, 25, 26, 27, 28, 29, 30, 31, 32, or 33 nucleotides) downstream of the 5′-NTTN-3′ sequence. In some embodiments, the deletion starts within about 5 to about 15 nucleotides (e.g., about 3, 4, 5, 6, 7, 8, 9, 10, 11, 12, 13, 14, 15, 16, or 17 nucleotides) downstream of a 5′-ATTA-3′, 5′-ATTT-3′, 5′-ATTG-3′, 5′-ATTC-3′, 5′-TTTA-3′, 5′-TTTT-3′, 5′-TTTG-3′, 5′-TTTC-3′, 5′-GTTA-3′, 5′-GTTT-3′, 5′-GTTG-3′, 5′-GTTC-3′, 5′-CTTA-3′, 5′-CTTT-3′, 5′-CTTG-3′, or 5′-CTTC-3′ sequence and ends within about 20 to about 30 nucleotides (e.g., about 17, 18, 19, 20, 21, 22, 23, 24, 25, 26, 27, 28, 29, 30, 31, 32, or 33 nucleotides) downstream of the 5′-ATTA-3′, 5′-ATTT-3′, 5′-ATTG-3′, 5′-ATTC-3′, 5′-TTTA-3′, 5′-TTTT-3′, 5′-TTTG-3′, 5′-TTTC-3′, 5′-GTTA-3′, 5′-GTTT-3′, 5′-GTTG-3′, 5′-GTTC-3′, 5′-CTTA-3′, 5′-CTTT-3′, 5′-CTTG-3′, or 5′-CTTC-3′ sequence. In some embodiments, the deletion starts within about 5 to about 15 nucleotides (e.g., about 3, 4, 5, 6, 7, 8, 9, 10, 11, 12, 13, 14, 15, 16, or 17 nucleotides) downstream of a T/C-rich sequence and ends within about 20 to about 30 nucleotides (e.g., about 17, 18, 19, 20, 21, 22, 23, 24, 25, 26, 27, 28, 29, 30, 31, 32, or 33 nucleotides) downstream of the T/C-rich sequence.

[0201] In some embodiments, the deletion starts within about 5 to about 15 nucleotides (e.g., about 3, 4, 5, 6, 7, 8, 9, 10, 11, 12, 13, 14, 15, 16, or 17 nucleotides) and ends within about 20 to about 25 nucleotides (e.g., about 17, 18, 19, 20, 21, 22, 23, 24, 25, 26, 27, or 28 nucleotides) of the 5′-NTTN-3′ sequence. In some embodiments, the deletion starts within about 5 to about 15 nucleotides (e.g., about 3, 4, 5, 6, 7, 8, 9, 10, 11, 12, 13, 14, 15, 16, or 17 nucleotides) and ends within about 20 to about 25 nucleotides (e.g., about 17, 18, 19, 20, 21, 22, 23, 24, 25, 26, 27, or 28 nucleotides) of a 5′-ATTA-3′, 5′-ATTT-3′, 5′-ATTG-3′, 5′-ATTC-3′, 5′-TTTA-3′, 5′-TTTT-3′, 5′-TTTG-3′, 5′-TTTC-3′, 5′-GTTA-3′, 5′-GTTT-3′, 5′-GTTG-3′, 5′-GTTC-3′, 5′-CTTA-3′, 5′-CTTT-3′, 5′-CTTG-3′, or 5′-CTTC-3′ sequence. In some embodiments, the deletion starts within about 5 to about 15 nucleotides (e.g., about 3, 4, 5, 6, 7, 8, 9, 10, 11, 12, 13, 14, 15, 16, or 17 nucleotides) and ends within about 20 to about 25 nucleotides (e.g., about 17, 18, 19, 20, 21, 22, 23, 24, 25, 26, 27, or 28 nucleotides) of a T/C-rich sequence.

[0202] In some embodiments, the deletion starts within about 5 to about 15 nucleotides (e.g., about 3, 4, 5, 6, 7, 8, 9, 10, 11, 12, 13, 14, 15, 16, or 17 nucleotides) downstream of the 5′-NTTN-3′ sequence and ends within about 20 to about 25 nucleotides (e.g., about 17, 18, 19, 20, 21, 22, 23, 24, 25, 26, 27, or 28 nucleotides) downstream of the 5′-NTTN-3′ sequence. In some embodiments, the deletion starts within about 5 to about 15 nucleotides (e.g., about 3, 4, 5, 6, 7, 8, 9, 10, 11, 12, 13, 14, 15, 16, or 17 nucleotides) downstream of a 5′-ATTA-3′, 5′-ATTT-3′, 5′-ATTG-3′, 5′-ATTC-3′, 5′-TTTA-3′, 5′-TTTT-3′, 5′-TTTG-3′, 5′-TTTC-3′, 5′-GTTA-3′, 5′-GTTT-3′, 5′-GTTG-3′, 5′-GTTC-3′, 5′-CTTA-3′, 5′-CTTT-3′, 5′-CTTG-3′, or 5′-CTTC-3′ sequence and ends within about 20 to about 25 nucleotides (e.g., about 17, 18, 19, 20, 21, 22, 23, 24, 25, 26, 27, or 28 nucleotides) downstream of the 5′-ATTA-3′, 5′-ATTT-3′, 5′-ATTG-3′, 5′-ATTC-3′, 5′-TTTA-3′, 5′-TTTT-3′, 5′-TTTG-3′, 5′-TTTC-3′, 5′-GTTA-3′, 5′-GTTT-3′, 5′-GTTG-3′, 5′-GTTC-3′, 5′-CTTA-3′, 5′-CTTT-3′, 5′-CTTG-3′, or 5′-CTTC-3′ sequence. In some embodiments, the deletion starts within about 5 to about 15 nucleotides (e.g., about 3, 4, 5, 6, 7, 8, 9, 10, 11, 12, 13, 14, 15, 16, or 17 nucleotides) downstream of a T/C-rich sequence and ends within about 20 to about 25 nucleotides (e.g., about 17, 18, 19, 20, 21, 22, 23, 24, 25, 26, 27, or 28 nucleotides) downstream of the T/C-rich sequence.

[0203] In some embodiments, the deletion starts within about 5 to about 15 nucleotides (e.g., about 3, 4, 5, 6, 7, 8, 9, 10, 11, 12, 13, 14, 15, 16, or 17 nucleotides) and ends within about 25 to about 30 nucleotides (e.g., about 22, 23, 24, 25, 26, 27, 28, 29, 30, 31, 32, or 33 nucleotides) of the 5′-NTTN-3′ sequence. In some embodiments, the deletion starts within about 5 to about 15 nucleotides (e.g., about 3, 4, 5, 6, 7, 8, 9, 10, 11, 12, 13, 14, 15, 16, or 17 nucleotides) and ends within about 25 to about 30 nucleotides (e.g., about 22, 23, 24, 25, 26, 27, 28, 29, 30, 31, 32, or 33 nucleotides) of a 5′-ATTA-3′, 5′-ATTT-3′, 5′-ATTG-3′, 5′-ATTC-3′, 5′-TTTA-3′, 5′-TTTT-3′, 5′-TTTG-3′, 5′-TTTC-3′, 5′-GTTA-3′, 5′-GTTT-3′, 5′-GTTG-3′, 5′-GTTC-3′, 5′-CTTA-3′, 5′-CTTT-3′, 5′-CTTG-3′, or 5′-CTTC-3′ sequence. In some embodiments, the deletion starts within about 5 to about 15 nucleotides (e.g., about 3, 4, 5, 6, 7, 8, 9, 10, 11, 12, 13, 14, 15, 16, or 17 nucleotides) and ends within about 25 to about 30 nucleotides (e.g., about 22, 23, 24, 25, 26, 27, 28, 29, 30, 31, 32, or 33 nucleotides) of a T/C-rich sequence.

[0204] In some embodiments, the deletion starts within about 5 to about 15 nucleotides (e.g., about 3, 4, 5, 6, 7, 8, 9, 10, 11, 12, 13, 14, 15, 16, or 17 nucleotides) downstream of the 5′-NTTN-3′ sequence and ends within about 25 to about 30 nucleotides (e.g., about 22, 23, 24, 25, 26, 27, 28, 29, 30, 31, 32, or 33 nucleotides) downstream of the 5′-NTTN-3′ sequence. In some embodiments, the deletion starts within about 5 to about 15 nucleotides (e.g., about 3, 4, 5, 6, 7, 8, 9, 10, 11, 12, 13, 14, 15, 16, or 17 nucleotides) downstream of a 5′-ATTA-3′, 5′-ATTT-3′, 5′-ATTG-3′, 5′-ATTC-3′, 5′-TTTA-3′, 5′-TTTT-3′, 5′-TTTG-3′, 5′-TTTC-3′, 5′-GTTA-3′, 5′-GTTT-3′, 5′-GTTG-3′, 5′-GTTC-3′, 5′-CTTA-3′, 5′-CTTT-3′, 5′-CTTG-3′, or 5′-CTTC-3′ sequence and ends within about 25 to about 30 nucleotides (e.g., about 22, 23, 24, 25, 26, 27, 28, 29, 30, 31, 32, or 33 nucleotides) downstream of the 5′-ATTA-3′, 5′-ATTT-3′, 5′-ATTG-3′, 5′-ATTC-3′, 5′-TTTA-3′, 5′-TTTT-3′, 5′-TTTG-3′, 5′-TTTC-3′, 5′-GTTA-3′, 5′-GTTT-3′, 5′-GTTG-3′, 5′-GTTC-3′, 5′-CTTA-3′, 5′-CTTT-3′, 5′-CTTG-3′, or 5′-CTTC-3′ sequence. In some embodiments, the deletion starts within about 5 to about 15 nucleotides (e.g., about 3, 4, 5, 6, 7, 8, 9, 10, 11, 12, 13, 14, 15, 16, or 17 nucleotides) downstream of a T/C-rich sequence and ends within about 25 to about 30 nucleotides (e.g., about 22, 23, 24, 25, 26, 27, 28, 29, 30, 31, 32, or 33 nucleotides) downstream of the T/C-rich sequence.

[0205] In some embodiments, the deletion starts within about 5 to about 10 nucleotides (e.g., about 3, 4, 5, 6, 7, 8, 9, 10, 11, or 12 nucleotides) and ends within about 20 to about 30 nucleotides (e.g., about 17, 18, 19, 20, 21, 22, 23, 24, 25, 26, 27, 28, 29, 30, 31, 32, or 33 nucleotides) of the 5′-NTTN-3′ sequence. In some embodiments, the deletion starts within about 5 to about 10 nucleotides (e.g., about 3, 4, 5, 6, 7, 8, 9, 10, 11, or 12 nucleotides) and ends within about 20 to about 30 nucleotides (e.g., about 17, 18, 19, 20, 21, 22, 23, 24, 25, 26, 27, 28, 29, 30, 31, 32, or 33 nucleotides) of a 5′-ATTA-3′, 5′-ATTT-3′, 5′-ATTG-3′, 5′-ATTC-3′, 5′-TTTA-3′, 5′-TTTT-3′, 5′-TTTG-3′, 5′-TTTC-3′, 5′-GTTA-3′, 5′-GTTT-3′, 5′-GTTG-3′, 5′-GTTC-3′, 5′-CTTA-3′, 5′-CTTT-3′, 5′-CTTG-3′, or 5′-CTTC-3′ sequence. In some embodiments, the deletion starts within about 5 to about 10 nucleotides (e.g., about 3, 4, 5, 6, 7, 8, 9, 10, 11, or 12 nucleotides) and ends within about 20 to about 30 nucleotides (e.g., about 17, 18, 19, 20, 21, 22, 23, 24, 25, 26, 27, 28, 29, 30, 31, 32, or 33 nucleotides) of a T/C-rich sequence.

[0206] In some embodiments, the deletion starts within about 5 to about 10 nucleotides (e.g., about 3, 4, 5, 6, 7, 8, 9, 10, 11, or 12 nucleotides) downstream of the 5′-NTTN-3′ sequence and ends within about 20 to about 30 nucleotides (e.g., about 17, 18, 19, 20, 21, 22, 23, 24, 25, 26, 27, 28, 29, 30, 31, 32, or 33 nucleotides) downstream of the 5′-NTTN-3′ sequence. In some embodiments, the deletion starts within about 5 to about 10 nucleotides (e.g., about 3, 4, 5, 6, 7, 8, 9, 10, 11, or 12 nucleotides) downstream of a 5′-ATTA-3′, 5′-ATTT-3′, 5′-ATTG-3′, 5′-ATTC-3′, 5′-TTTA-3′, 5′-TTTT-3′, 5′-TTTG-3′, 5′-TTTC-3′, 5′-GTTA-3′, 5′-GTTT-3′, 5′-GTTG-3′, 5′-GTTC-3′, 5′-CTTA-3′, 5′-CTTT-3′, 5′-CTTG-3′, or 5′-CTTC-3′ sequence and ends within about 20 to about 30 nucleotides (e.g., about 17, 18, 19, 20, 21, 22, 23, 24, 25, 26, 27, 28, 29, 30, 31, 32, or 33 nucleotides) downstream of the 5′-ATTA-3′, 5′-ATTT-3′, 5′-ATTG-3′, 5′-ATTC-3′, 5′-TTTA-3′, 5′-TTTT-3′, 5′-TTTG-3′, 5′-TTTC-3′, 5′-GTTA-3′, 5′-GTTT-3′, 5′-GTTG-3′, 5′-GTTC-3′, 5′-CTTA-3′, 5′-CTTT-3′, 5′-CTTG-3′, or 5′-CTTC-3′ sequence. In some embodiments, the deletion starts within about 5 to about 10 nucleotides (e.g., about 3, 4, 5, 6, 7, 8, 9, 10, 11, or 12 nucleotides) downstream of a T/C-rich sequence and ends within about 20 to about 30 nucleotides (e.g., about 17, 18, 19, 20, 21, 22, 23, 24, 25, 26, 27, 28, 29, 30, 31, 32, or 33 nucleotides) downstream of the T/C-rich sequence.

[0207] In some embodiments, the deletion starts within about 5 to about 10 nucleotides (e.g., about 3, 4, 5, 6, 7, 8, 9, 10, 11, or 12 nucleotides) and ends within about 20 to about 25 nucleotides (e.g., about 17, 18, 19, 20, 21, 22, 23, 24, 25, 26, 27, or 28 nucleotides) of the 5′-NTTN-3′ sequence. In some embodiments, the deletion starts within about 5 to about 10 nucleotides (e.g., about 3, 4, 5, 6, 7, 8, 9, 10, 11, or 12 nucleotides) and ends within about 20 to about 25 nucleotides (e.g., about 17, 18, 19, 20, 21, 22, 23, 24, 25, 26, 27, or 28 nucleotides) of a 5′-ATTA-3′, 5′-ATTT-3′, 5′-ATTG-3′, 5′-ATTC-3′, 5′-TTTA-3′, 5′-TTTT-3′, 5′-TTTG-3′, 5′-TTTC-3′, 5′-GTTA-3′, 5′-GTTT-3′, 5′-GTTG-3′, 5′-GTTC-3′, 5′-CTTA-3′, 5′-CTTT-3′, 5′-CTTG-3′, or 5′-CTTC-3′ sequence. In some embodiments, the deletion starts within about 5 to about 10 nucleotides and ends within about 20 to about 25 nucleotides (e.g., about 17, 18, 19, 20, 21, 22, 23, 24, 25, 26, 27, or 28 nucleotides) (e.g., about 3, 4, 5, 6, 7, 8, 9, 10, 11, or 12 nucleotides) of a T/C-rich sequence.

[0208] In some embodiments, the deletion starts within about 5 to about 10 nucleotides (e.g., about 3, 4, 5, 6, 7, 8, 9, 10, 11, or 12 nucleotides) downstream of the 5′-NTTN-3′ sequence and ends within about 20 to about 25 nucleotides (e.g., about 17, 18, 19, 20, 21, 22, 23, 24, 25, 26, 27, or 28 nucleotides) downstream of the 5′-NTTN-3′ sequence. In some embodiments, the deletion starts within about 5 to about 10 nucleotides (e.g., about 3, 4, 5, 6, 7, 8, 9, 10, 11, or 12 nucleotides) downstream of a 5′-ATTA-3′, 5′-ATTT-3′, 5′-ATTG-3′, 5′-ATTC-3′, 5′-TTTA-3′, 5′-TTTT-3′, 5′-TTTG-3′, 5′-TTTC-3′, 5′-GTTA-3′, 5′-GTTT-3′, 5′-GTTG-3′, 5′-GTTC-3′, 5′-CTTA-3′, 5′-CTTT-3′, 5′-CTTG-3′, or 5′-CTTC-3′ sequence and ends within about 20 to about 25 nucleotides (e.g., about 17, 18, 19, 20, 21, 22, 23, 24, 25, 26, 27, or 28 nucleotides) downstream of the 5′-ATTA-3′, 5′-ATTT-3′, 5′-ATTG-3′, 5′-ATTC-3′, 5′-TTTA-3′, 5′-TTTT-3′, 5′-TTTG-3′, 5′-TTTC-3′, 5′-GTTA-3′, 5′-GTTT-3′, 5′-GTTG-3′, 5′-GTTC-3′, 5′-CTTA-3′, 5′-CTTT-3′, 5′-CTTG-3′, or 5′-CTTC-3′ sequence. In some embodiments, the deletion starts within about 5 to about 10 nucleotides (e.g., about 3, 4, 5, 6, 7, 8, 9, 10, 11, or 12 nucleotides) downstream of a T/C-rich sequence and ends within about 20 to about 25 nucleotides (e.g., about 17, 18, 19, 20, 21, 22, 23, 24, 25, 26, 27, or 28 nucleotides) downstream of the T/C-rich sequence.

[0209] In some embodiments, the deletion starts within about 5 to about 10 nucleotides (e.g., about 3, 4, 5, 6, 7, 8, 9, 10, 11, or 12 nucleotides) and ends within about 25 to about 30 nucleotides (e.g., about 22, 23, 24, 25, 26, 27, 28, 29, 30, 31, 32, or 33 nucleotides) of the 5′-NTTN-3′ sequence. In some embodiments, the deletion starts within about 5 to about 10 nucleotides (e.g., about 3, 4, 5, 6, 7, 8, 9, 10, 11, or 12 nucleotides) and ends within about 25 to about 30 nucleotides (e.g., about 22, 23, 24, 25, 26, 27, 28, 29, 30, 31, 32, or 33 nucleotides) of a T/C-rich sequence.

[0210] In some embodiments, the deletion starts within about 5 to about 10 nucleotides (e.g., about 3, 4, 5, 6, 7, 8, 9, 10, 11, or 12 nucleotides) downstream of the 5′-NTTN-3′ sequence and ends within about 25 to about 30 nucleotides (e.g., about 22, 23, 24, 25, 26, 27, 28, 29, 30, 31, 32, or 33 nucleotides) downstream of the 5′-NTTN-3′ sequence. In some embodiments, the deletion starts within about 5 to about 10 nucleotides (e.g., about 3, 4, 5, 6, 7, 8, 9, 10, 11, or 12 nucleotides) downstream of a 5′-ATTA-3′, 5′-ATTT-3′, 5′-ATTG-3′, 5′-ATTC-3′, 5′-TTTA-3′, 5′-TTTT-3′, 5′-TTTG-3′, 5′-TTTC-3′, 5′-GTTA-3′, 5′-GTTT-3′, 5′-GTTG-3′, 5′-GTTC-3′, 5′-CTTA-3′, 5′-CTTT-3′, 5′-CTTG-3′, or 5′-CTTC-3′ sequence and ends within about 25 to about 30 nucleotides (e.g., about 22, 23, 24, 25, 26, 27, 28, 29, 30, 31, 32, or 33 nucleotides) downstream of the 5′-ATTA-3′, 5′-ATTT-3′, 5′-ATTG-3′, 5′-ATTC-3′, 5′-TTTA-3′, 5′-TTTT-3′, 5′-TTTG-3′, 5′-TTTC-3′, 5′-GTTA-3′, 5′-GTTT-3′, 5′-GTTG-3′, 5′-GTTC-3′, 5′-CTTA-3′, 5′-CTTT-3′, 5′-CTTG-3′, or 5′-CTTC-3′ sequence. In some embodiments, the deletion starts within about 5 to about 10 nucleotides (e.g., about 3, 4, 5, 6, 7, 8, 9, 10, 11, or 12 nucleotides) downstream of a T/C-rich sequence and ends within about 25 to about 30 nucleotides (e.g., about 22, 23, 24, 25, 26, 27, 28, 29, 30, 31, 32, or 33 nucleotides) downstream of the T/C-rich sequence.

[0211] In some embodiments, the deletion starts within about 10 to about 15 nucleotides (e.g., about 8, 9, 10, 11, 12, 13, 14, 15, 16, or 17 nucleotides) and ends within about 20 to about 30 nucleotides (e.g., about 17, 18, 19, 20, 21, 22, 23, 24, 25, 26, 27, 28, 29, 30, 31, 32, or 33 nucleotides) of the 5′-NTTN-3′ sequence. In some embodiments, the deletion starts within about 10 to about 15 nucleotides (e.g., about 8, 9, 10, 11, 12, 13, 14, 15, 16, or 17 nucleotides) and ends within about 20 to about 30 nucleotides (e.g., about 17, 18, 19, 20, 21, 22, 23, 24, 25, 26, 27, 28, 29, 30, 31, 32, or 33 nucleotides) of a 5′-ATTA-3′, 5′-ATTT-3′, 5′-ATTG-3′, 5′-ATTC-3′, 5′-TTTA-3′, 5′-TTTT-3′, 5′-TTTG-3′, 5′-TTTC-3′, 5′-GTTA-3′, 5′-GTTT-3′, 5′-GTTG-3′, 5′-GTTC-3′, 5′-CTTA-3′, 5′-CTTT-3′, 5′-CTTG-3′, or 5′-CTTC-3′ sequence. In some embodiments, the deletion starts within about 10 to about 15 nucleotides (e.g., about 8, 9, 10, 11, 12, 13, 14, 15, 16, or 17 nucleotides) and ends within about 20 to about 30 nucleotides (e.g., about 17, 18, 19, 20, 21, 22, 23, 24, 25, 26, 27, 28, 29, 30, 31, 32, or 33 nucleotides) of a T/C-rich sequence.

[0212] In some embodiments, the deletion starts within about 10 to about 15 nucleotides (e.g., about 8, 9, 10, 11, 12, 13, 14, 15, 16, or 17 nucleotides) downstream of the 5′-NTTN-3′ sequence and ends within about 20 to about 30 nucleotides (e.g., about 17, 18, 19, 20, 21, 22, 23, 24, 25, 26, 27, 28, 29, 30, 31, 32, or 33 nucleotides) downstream of the 5′-NTTN-3′ sequence. In some embodiments, the deletion starts within about 10 to about 15 nucleotides (e.g., about 8, 9, 10, 11, 12, 13, 14, 15, 16, or 17 nucleotides) downstream of a 5′-ATTA-3′, 5′-ATTT-3′, 5′-ATTG-3′, 5′-ATTC-3′, 5′-TTTA-3′, 5′-TTTT-3′, 5′-TTTG-3′, 5′-TTTC-3′, 5′-GTTA-3′, 5′-GTTT-3′, 5′-GTTG-3′, 5′-GTTC-3′, 5′-CTTA-3′, 5′-CTTT-3′, 5′-CTTG-3′, or 5′-CTTC-3′ sequence and ends within about 20 to about 30 nucleotides (e.g., about 17, 18, 19, 20, 21, 22, 23, 24, 25, 26, 27, 28, 29, 30, 31, 32, or 33 nucleotides) downstream of the 5′-ATTA-3′, 5′-ATTT-3′, 5′-ATTG-3′, 5′-ATTC-3′, 5′-TTTA-3′, 5′-TTTT-3′, 5′-TTTG-3′, 5′-TTTC-3′, 5′-GTTA-3′, 5′-GTTT-3′, 5′-GTTG-3′, 5′-GTTC-3′, 5′-CTTA-3′, 5′-CTTT-3′, 5′-CTTG-3′, or 5′-CTTC-3′ sequence. In some embodiments, the deletion starts within about 10 to about 15 nucleotides (e.g., about 8, 9, 10, 11, 12, 13, 14, 15, 16, or 17 nucleotides) downstream of a T/C-rich sequence and ends within about 20 to about 30 nucleotides (e.g., about 17, 18, 19, 20, 21, 22, 23, 24, 25, 26, 27, 28, 29, 30, 31, 32, or 33 nucleotides) downstream of the T/C-rich sequence.

[0213] In some embodiments, the deletion starts within about 10 to about 15 nucleotides (e.g., about 8, 9, 10, 11, 12, 13, 14, 15, 16, or 17 nucleotides) and ends within about 20 to about 25 nucleotides (e.g., about 17, 18, 19, 20, 21, 22, 23, 24, 25, 26, 27, or 28 nucleotides) of the 5′-NTTN-3′ sequence. In some embodiments, the deletion starts within about 10 to about 15 nucleotides (e.g., about 8, 9, 10, 11, 12, 13, 14, 15, 16, or 17 nucleotides) and ends within about 20 to about 25 nucleotides (e.g., about 17, 18, 19, 20, 21, 22, 23, 24, 25, 26, 27, or 28 nucleotides) of a 5′-ATTA-3′, 5′-ATTT-3′, 5′-ATTG-3′, 5′-ATTC-3′, 5′-TTTA-3′, 5′-TTTT-3′, 5′-TTTG-3′, 5′-TTTC-3′, 5′-GTTA-3′, 5′-GTTT-3′, 5′-GTTG-3′, 5′-GTTC-3′, 5′-CTTA-3′, 5′-CTTT-3′, 5′-CTTG-3′, or 5′-CTTC-3′ sequence. In some embodiments, the deletion starts within about 10 to about 15 nucleotides (e.g., about 8, 9, 10, 11, 12, 13, 14, 15, 16, or 17 nucleotides) and ends within about 20 to about 25 nucleotides (e.g., about 17, 18, 19, 20, 21, 22, 23, 24, 25, 26, 27, or 28 nucleotides) of a T/C-rich sequence.

[0214] In some embodiments, the deletion starts within about 10 to about 15 nucleotides (e.g., about 8, 9, 10, 11, 12, 13, 14, 15, 16, or 17 nucleotides) downstream of the 5′-NTTN-3′ sequence and ends within about 20 to about 25 nucleotides (e.g., about 17, 18, 19, 20, 21, 22, 23, 24, 25, 26, 27, or 28 nucleotides) downstream of the 5′-NTTN-3′ sequence. In some embodiments, the deletion starts within about 10 to about 15 nucleotides (e.g., about 8, 9, 10, 11, 12, 13, 14, 15, 16, or 17 nucleotides) downstream of a 5′-ATTA-3′, 5′-ATTT-3′, 5′-ATTG-3′, 5′-ATTC-3′, 5′-TTTA-3′, 5′-TTTT-3′, 5′-TTTG-3′, 5′-TTTC-3′, 5′-GTTA-3′, 5′-GTTT-3′, 5′-GTTG-3′, 5′-GTTC-3′, 5′-CTTA-3′, 5′-CTTT-3′, 5′-CTTG-3′, or 5′-CTTC-3′ sequence and ends within about 20 to about 25 nucleotides (e.g., about 17, 18, 19, 20, 21, 22, 23, 24, 25, 26, 27, or 28 nucleotides) downstream of the 5′-ATTA-3′, 5′-ATTT-3′, 5′-ATTG-3′, 5′-ATTC-3′, 5′-TTTA-3′, 5′-TTTT-3′, 5′-TTTG-3′, 5′-TTTC-3′, 5′-GTTA-3′, 5′-GTTT-3′, 5′-GTTG-3′, 5′-GTTC-3′, 5′-CTTA-3′, 5′-CTTT-3′, 5′-CTTG-3′, or 5′-CTTC-3′ sequence. In some embodiments, the deletion starts within about 10 to about 15 nucleotides (e.g., about 8, 9, 10, 11, 12, 13, 14, 15, 16, or 17 nucleotides) downstream of a T/C-rich sequence and ends within about 20 to about 25 nucleotides (e.g., about 17, 18, 19, 20, 21, 22, 23, 24, 25, 26, 27, or 28 nucleotides) downstream of the T/C-rich sequence.

[0215] In some embodiments, the deletion starts within about 10 to about 15 nucleotides (e.g., about 8, 9, 10, 11, 12, 13, 14, 15, 16, or 17 nucleotides) and ends within about 25 to about 30 nucleotides (e.g., about 22, 23, 24, 25, 26, 27, 28, 29, 30, 31, 32, or 33 nucleotides) of the 5′-NTTN-3′ sequence. In some embodiments, the deletion starts within about 10 to about 15 nucleotides (e.g., about 8, 9, 10, 11, 12, 13, 14, 15, 16, or 17 nucleotides) and ends within about 25 to about 30 nucleotides (e.g., about 22, 23, 24, 25, 26, 27, 28, 29, 30, 31, 32, or 33 nucleotides) of a 5′-ATTA-3′, 5′-ATTT-3′, 5′-ATTG-3′, 5′-ATTC-3′, 5′-TTTA-3′, 5′-TTTT-3′, 5′-TTTG-3′, 5′-TTTC-3′, 5′-GTTA-3′, 5′-GTTT-3′, 5′-GTTG-3′, 5′-GTTC-3′, 5′-CTTA-3′, 5′-CTTT-3′, 5′-CTTG-3′, or 5′-CTTC-3′ sequence. In some embodiments, the deletion starts within about 10 to about 15 nucleotides (e.g., about 8, 9, 10, 11, 12, 13, 14, 15, 16, or 17 nucleotides) and ends within about 25 to about 30 nucleotides (e.g., about 22, 23, 24, 25, 26, 27, 28, 29, 30, 31, 32, or 33 nucleotides) of a T/C-rich sequence.

[0216] In some embodiments, the deletion starts within about 10 to about 15 nucleotides (e.g., about 8, 9, 10, 11, 12, 13, 14, 15, 16, or 17 nucleotides) downstream of the 5′-NTTN-3′ sequence and ends within about 25 to about 30 nucleotides (e.g., about 22, 23, 24, 25, 26, 27, 28, 29, 30, 31, 32, or 33 nucleotides) downstream of the 5′-NTTN-3′ sequence. In some embodiments, the deletion starts within about 10 to about 15 nucleotides (e.g., about 8, 9, 10, 11, 12, 13, 14, 15, 16, or 17 nucleotides) downstream of a 5′-ATTA-3′, 5′-ATTT-3′, 5′-ATTG-3′, 5′-ATTC-3′, 5′-TTTA-3′, 5′-TTTT-3′, 5′-TTTG-3′, 5′-TTTC-3′, 5′-GTTA-3′, 5′-GTTT-3′, 5′-GTTG-3′, 5′-GTTC-3′, 5′-CTTA-3′, 5′-CTTT-3′, 5′-CTTG-3′, or 5′-CTTC-3′ sequence and ends within about 25 to about 30 nucleotides (e.g., about 22, 23, 24, 25, 26, 27, 28, 29, 30, 31, 32, or 33 nucleotides) downstream of the 5′-ATTA-3′, 5′-ATTT-3′, 5′-ATTG-3′, 5′-ATTC-3′, 5′-TTTA-3′, 5′-TTTT-3′, 5′-TTTG-3′, 5′-TTTC-3′, 5′-GTTA-3′, 5′-GTTT-3′, 5′-GTTG-3′, 5′-GTTC-3′, 5′-CTTA-3′, 5′-CTTT-3′, 5′-CTTG-3′, or 5′-CTTC-3′ sequence. In some embodiments, the deletion starts within about 10 to about 15 nucleotides (e.g., about 8, 9, 10, 11, 12, 13, 14, 15, 16, or 17 nucleotides) downstream of a T/C-rich sequence and ends within about 25 to about 30 nucleotides (e.g., about 22, 23, 24, 25, 26, 27, 28, 29, 30, 31, 32, or 33 nucleotides) downstream of the T/C-rich sequence.

[0217] In some embodiments, the deletion is up to about 50 nucleotides in length (e.g., about 1, 2, 3, 4, 5, 6, 7, 8, 9, 10, 11, 12, 13, 14, 15, 16, 17, 18, 19, 20, 21, 22, 23, 24, 25, 26, 27, 28, 29, 30, 31, 32, 33, 34, 35, 36, 37, 38, 39, 40, 41, 42, 43, 44, 45, 46, 47, 48, 49, 50, 51, 52, 53, 54, or 55 nucleotides). In some embodiments, the deletion is up to about 40 nucleotides in length (e.g., about 1, 2, 3, 4, 5, 6, 7, 8, 9, 10, 11, 12, 13, 14, 15, 16, 17, 18, 19, 20, 21, 22, 23, 24, 25, 26, 27, 28, 29, 30, 31, 32, 33, 34, 35, 36, 37, 38, 39, 40, 41, 42, 43, 44, or 45 nucleotides). In some embodiments, the deletion is between about 4 nucleotides and about 40 nucleotides in length (e.g., about 3, 4, 5, 6, 7, 8, 9, 10, 11, 12, 13, 14, 15, 16, 17, 18, 19, 20, 21, 22, 23, 24, 25, 26, 27, 28, 29, 30, 31, 32, 33, 34, 35, 36, 37, 38, 39, 40, 41, 42, 43, 44, or 45 nucleotides). In some embodiments, the deletion is between about 4 nucleotides and about 25 nucleotides in length (e.g., about 3, 4, 5, 6, 7, 8, 9, 10, 11, 12, 13, 14, 15, 16, 17, 18, 19, 20, 21, 22, 23, 24, 25, 26, 27, or 28 nucleotides). In some embodiments, the deletion is between about 10 nucleotides and about 25 nucleotides in length (e.g., about 7, 8, 9, 10, 11, 12, 13, 14, 15, 16, 17, 18, 19, 20, 21, 22, 23, 24, 25, 26, 27, or 28 nucleotides). In some embodiments, the deletion is between about 10 nucleotides and about 15 nucleotides in length (e.g., about 7, 8, 9, 10, 11, 12, 13, 14, 15, 16, or 17 nucleotides).

[0218] In some embodiments, two or more RNA guides described herein are used to introduce a deletion that has a length of greater than 40 nucleotides. In some embodiments, two or more RNA guides described herein are used to introduce a deletion of at least about 41, 42, 43, 44, 45, 46, 47, 48, 49, 50, 55, 60, 65, 70, 75, 80, 85, 90, 95, 100, 110, 120, 130, 140, 150, 16, 170, 180, 190, 200, 210, 220, 230, 240, 250, 260, 270, 280, 290, 300, 310, 320, 330, 340, 350, 360, 370, 380, 390, or 400 nucleotides. In some embodiments, two or more RNA guides described herein are used delete all or a portion of the STMN2 gene or SEQ ID NO: 454.

[0219] In some embodiments, the methods described herein are used to engineer a cell comprising a deletion as described herein in a STMN2 gene. In some embodiments, the methods are carried out using a complex comprising a Cas12i enzyme as described herein and an RNA guide comprising a direct repeat sequence and a spacer sequence as described herein.

[0220] In some embodiments, the RNA guide targeting STMN2 is encoded in a plasmid. In some embodiments, the RNA guide targeting STMN2 is synthetic or purified RNA. In some embodiments, the Cas12i polypeptide is encoded in a plasmid. In some embodiments, the Cas12i polypeptide is encoded by an RNA that is synthetic or purified.

[0221] C. Delivery

[0222] Components of any of the gene editing systems disclosed herein may be formulated, for example, including a carrier, such as a carrier and/or a polymeric carrier, e.g., a liposome, and delivered by known methods to a cell (e.g., a prokaryotic, eukaryotic, plant, mammalian, etc.). Such methods include, but not limited to, transfection (e.g., lipid-mediated, cationic polymers, calcium phosphate, dendrimers); electroporation or other methods of membrane disruption (e.g., nucleofection), viral delivery (e.g., lentivirus, retrovirus, adenovirus, adeno-associated virus (AAV)), microinjection, microprojectile bombardment (“gene gun”), fugene, direct sonic loading, cell squeezing, optical transfection, protoplast fusion, impalefection, magnetofection, exosome-mediated transfer, lipid nanoparticle-mediated transfer, and any combination thereof.

[0223] In some embodiments, the method comprises delivering one or more nucleic acids (e.g., nucleic acids encoding the Cas12i polypeptide, RNA guide, donor DNA, etc.), one or more transcripts thereof, and/or a pre-formed RNA guide/Cas12i polypeptide complex to a cell, where a ternary complex is formed. In some embodiments, an RNA guide and an RNA encoding a Cas12i polypeptide are delivered together in a single composition. In some embodiments, an RNA guide and an RNA encoding a Cas12i polypeptide are delivered in separate compositions. In some embodiments, an RNA guide and an RNA encoding a Cas12i polypeptide delivered in separate compositions are delivered using the same delivery technology. In some embodiments, an RNA guide and an RNA encoding a Cas12i polypeptide delivered in separate compositions are delivered using different delivery technologies.

[0224] In some embodiments, the Cas12i component and the RNA guide component are delivered together. For example, the Cas12i component and the RNA guide component are packaged together in a single AAV particle. In another example, the Cas12i component and the RNA guide component are delivered together via lipid nanoparticles (LNPs). In some embodiments, the Cas12i component and the RNA guide component are delivered separately. For example, the Cas12i component and the RNA guide are packaged into separate AAV particles. In another example, the Cas12i component is delivered by a first delivery mechanism and the RNA guide is delivered by a second delivery mechanism.

[0225] Exemplary intracellular delivery methods, include, but are not limited to: viruses, such as AAV, or virus-like agents; chemical-based transfection methods, such as those using calcium phosphate, dendrimers, liposomes, or cationic polymers (e.g., DEAE-dextran or polyethylenimine); non-chemical methods, such as microinjection, electroporation, cell squeezing, sonoporation, optical transfection, impalefection, protoplast fusion, bacterial conjugation, delivery of plasmids or transposons; particle-based methods, such as using a gene gun, magnectofection or magnet assisted transfection, particle bombardment; and hybrid methods, such as nucleofection. In some embodiments, a lipid nanoparticle comprises an mRNA encoding a Cas12i polypeptide, an RNA guide, or an mRNA encoding a Cas12i polypeptide and an RNA guide. In some embodiments, the mRNA encoding the Cas12i polypeptide is a transcript of the nucleotide sequence set forth in SEQ ID NO: 447 or SEQ ID NO: 481 or a variant thereof. In some embodiments, the present application further provides cells produced by such methods, and organisms (such as animals, plants, or fungi) comprising or produced from such cells.

[0226] D. Genetically Modified Cells

[0227] Any of the gene editing systems disclosed herein can be delivered to a variety of cells. In some embodiments, the cell is an isolated cell. In some embodiments, the cell is in cell culture or a co-culture of two or more cell types. In some embodiments, the cell is ex vivo. In some embodiments, the cell is obtained from a living organism and maintained in a cell culture. In some embodiments, the cell is a single-cellular organism.

[0228] In some embodiments, the cell is a prokaryotic cell. In some embodiments, the cell is a bacterial cell or derived from a bacterial cell. In some embodiments, the cell is an archaeal cell or derived from an archaeal cell.

[0229] In some embodiments, the cell is a eukaryotic cell. In some embodiments, the cell is a plant cell or derived from a plant cell. In some embodiments, the cell is a fungal cell or derived from a fungal cell. In some embodiments, the cell is an animal cell or derived from an animal cell. In some embodiments, the cell is an invertebrate cell or derived from an invertebrate cell. In some embodiments, the cell is a vertebrate cell or derived from a vertebrate cell. In some embodiments, the cell is a mammalian cell or derived from a mammalian cell. In some embodiments, the cell is a human cell. In some embodiments, the cell is a zebra fish cell. In some embodiments, the cell is a rodent cell. In some embodiments, the cell is synthetically made, sometimes termed an artificial cell.

[0230] In some embodiments, the cell is derived from a cell line. A wide variety of cell lines for tissue culture are known in the art. Examples of cell lines include, but are not limited to, 293T, MF7, K562, HeLa, CHO, and transgenic varieties thereof. Cell lines are available from a variety of sources known to those with skill in the art (see, e.g., the American Type Culture Collection (ATCC) (Manassas, Va.)). In some embodiments, the cell is an immortal or immortalized cell.

[0231] In some embodiments, the cell is a primary cell. In some embodiments, the cell is a stem cell such as a totipotent stem cell (e.g., omnipotent), a pluripotent stem cell, a multipotent stem cell, an oligopotent stem cell, or an unipotent stem cell. In some embodiments, the cell is an induced pluripotent stem cell (iPSC) or derived from an iPSC. In some embodiments, the cell is a differentiated cell. For example, in some embodiments, the differentiated cell is a neural cell (e.g., a glial cell, such as an astrocyte, an oligodendrocyte, a microglial cell, or an ependymal cell, or a neuron), muscle cell (e.g., a myocyte), a fat cell (e.g., an adipocyte), a bone cell (e.g., an osteoblast, osteocyte, osteoclast), a blood cell (e.g., a monocyte, a lymphocyte, a neutrophil, an eosinophil, a basophil, a macrophage, a erythrocyte, or a platelet), an epithelial cell, an immune cell (e.g., a lymphocyte, a neutrophil, a monocyte, or a macrophage), a liver cell (e.g., a hepatocyte), a fibroblast, or a sex cell. In some embodiments, the cell is a terminally differentiated cell. For example, in some embodiments, the terminally differentiated cell is a neuronal cell, an adipocyte, a cardiomyocyte, a skeletal muscle cell, an epidermal cell, or a gut cell. In some embodiments, the cell is an immune cell. In some embodiments, the immune cell is a T cell. In some embodiments, the immune cell is a B cell. In some embodiments, the immune cell is a Natural Killer (NK) cell. In some embodiments, the immune cell is a Tumor Infiltrating Lymphocyte (TIL). In some embodiments, the cell is a cancer cell (e.g., a colorectal cancer cell, renal cell cancer cell, breast cancer cell, or glioma cell). In some embodiments, the cell is a mammalian cell, e.g., a human cell or a murine cell. In some embodiments, the murine cell is derived from a wild-type mouse, an immunosuppressed mouse, or a disease-specific mouse model. In some embodiments, the cell is a cell within a living tissue, organ, or organism.

[0232] Any of the genetically modified cells produced using any of the gene editing system disclosed herein is also within the scope of the present disclosure. Such modified cells may comprise a disrupted STMN2 gene.

[0233] Any of the gene editing systems, compositions comprising such, vectors, nucleic acids, RNA guides and cells disclosed herein may be used in therapy. Gene editing systems, compositions, vectors, nucleic acids, RNA guides and cells disclosed herein may be used in methods of treating a disease or condition in a subject. Any suitable delivery or administration method known in the art may be used to deliver compositions, vectors, nucleic acids, RNA guides and cells disclosed herein. Such methods may involve contacting a target sequence with a composition, vector, nucleic acid, or RNA guide disclosed herein. Such methods may involve a method of editing a STMN2 sequence as disclosed herein. In some embodiments, a cell engineered using an RNA guide disclosed herein is used for ex vivo gene therapy.

[0234] IV. Therapeutic Applications

[0235] Any of the gene editing systems or modified cells generated using such a gene editing system as disclosed herein may be used for treating a disease that is associated with the STMN2 gene, for example, neurodegenerative diseases (e.g., amyotrophic lateral sclerosis (ALS) or frontotemporal dementia (FTD)). Any suitable delivery or administration method known in the art may be used to deliver compositions, vectors, nucleic acids, RNA guides and cells disclosed herein. Such methods may involve contacting a target sequence with a composition, vector, nucleic acid, or RNA guide disclosed herein. Such methods may involve a method of editing a STMN2 sequence as disclosed herein. In some embodiments, a cell engineered using an RNA guide disclosed herein is used for ex vivo gene therapy. In some embodiments, provided herein is a method for treating a target disease as disclosed herein (e.g., a neurodegenerative disease) comprising administering to a subject (e.g., a human patient) in need of the treatment any of the gene editing systems disclosed herein. The gene editing system may be delivered to a specific tissue or specific type of cells where the gene edit is needed. The gene editing system may comprise LNPs encompassing one or more of the components, one or more vectors (e.g., viral vectors) encoding one or more of the components, or a combination thereof. Components of the gene editing system may be formulated to form a pharmaceutical composition, which may further comprise one or more pharmaceutically acceptable carriers.

[0236] In some embodiments, modified cells produced using any of the gene editing systems disclosed herein may be administered to a subject (e.g., a human patient) in need of the treatment. The modified cells may comprise a substitution, insertion, and/or deletion described herein. In some examples, the modified cells may include a cell line modified by a CRISPR nuclease, reverse transcriptase polypeptide, and editing template RNA (e.g., RNA guide and RT donor RNA). In some instances, the modified cells may be a heterogenous population comprising cells with different types of gene edits. Alternatively, the modified cells may comprise a substantially homogenous cell population (e.g., at least 80% of the cells in the whole population) comprising one particular gene edit in the STMN2 gene. In some examples, the cells can be suspended in a suitable media.

[0237] In some embodiments, provided herein is a composition comprising the gene editing system or components thereof. Such a composition can be a pharmaceutical composition. A pharmaceutical composition that is useful may be prepared, packaged, or sold in a formulation suitable for oral, rectal, vaginal, parenteral, topical, pulmonary, intranasal, intra-lesional, buccal, ophthalmic, intravenous, intra-organ or another route of administration. A pharmaceutical composition of the disclosure may be prepared, packaged, or sold in bulk, as a single unit dose, or as a plurality of single unit doses. As used herein, a “unit dose” is discrete amount of the pharmaceutical composition (e.g., the gene editing system or components thereof), which would be administered to a subject or a convenient fraction of such a dosage such as, for example, one-half or one-third of such a dosage.

[0238] A formulation of a pharmaceutical composition suitable for parenteral administration may comprise the active agent (e.g., the gene editing system or components thereof or the modified cells) combined with a pharmaceutically acceptable carrier, such as sterile water or sterile isotonic saline. Such a formulation may be prepared, packaged, or sold in a form suitable for bolus administration or for continuous administration. Some injectable formulations may be prepared, packaged, or sold in unit dosage form, such as in ampules or in multi-dose containers containing a preservative. Some formulations for parenteral administration include, but are not limited to, suspensions, solutions, emulsions in oily or aqueous vehicles, pastes, and implantable sustained-release or biodegradable formulations. Some formulations may further comprise one or more additional ingredients including, but not limited to, suspending, stabilizing, or dispersing agents.

[0239] The pharmaceutical composition may be in the form of a sterile injectable aqueous or oily suspension or solution. This suspension or solution may be formulated according to the known art, and may comprise, in addition to the cells, additional ingredients such as the dispersing agents, wetting agents, or suspending agents described herein. Such sterile injectable formulation may be prepared using a non-toxic parenterally-acceptable diluent or solvent, such as water or saline. Other acceptable diluents and solvents include, but are not limited to, Ringer's solution, isotonic sodium chloride solution, and fixed oils such as synthetic mono- or di-glycerides. Other parentally-administrable formulations which that are useful include those which may comprise the cells in a packaged form, in a liposomal preparation, or as a component of a biodegradable polymer system. Some compositions for sustained release or implantation may comprise pharmaceutically acceptable polymeric or hydrophobic materials such as an emulsion, an ion exchange resin, a sparingly soluble polymer, or a sparingly soluble salt.

### V. Kits and Uses Thereof

[0240] The present disclosure also provides kits that can be used, for example, to carry out a method described herein for genetical modification of the STMN2 gene. In some embodiments, the kits include an RNA guide and a Cas12i polypeptide. In some embodiments, the kits include an RNA guide, a template DNA, and a Cas12i polypeptide. In some embodiments, the kits include a polynucleotide that encodes such a Cas12i polypeptide, and optionally the polynucleotide is comprised within a vector, e.g., as described herein. In some embodiments, the kits include a polynucleotide that encodes an RNA guide disclosed herein. The Cas12i polypeptide (or polynucleotide encoding the Cas12i polypeptide) and the RNA guide (e.g., as a ribonucleoprotein) can be packaged within the same or other vessel within a kit or can be packaged in separate vials or other vessels, the contents of which can be mixed prior to use.

[0241] The Cas12i polypeptide, the RNA guide, and the template DNA can be packaged within the same or other vessel within a kit or can be packaged in separate vials or other vessels, the contents of which can be mixed prior to use. The kits can additionally include, optionally, a buffer and/or instructions for use of the RNA guide, template DNA, and Cas12i polypeptide.

[0242] All references and publications cited herein are hereby incorporated by reference.

### Additional Embodiments

[0243] Provided below are additional embodiments, which are also within the scope of the present disclosure.

[0244] Embodiment 1: A composition comprising an RNA guide, wherein the RNA guide comprises (i) a spacer sequence that is substantially complementary or complete complementary to a region on a non-PAM strand (the complementary sequence of a target sequence) within an STMN2 gene and (ii) a direct repeat sequence; wherein the target sequence is adjacent to a protospacer adjacent motif (PAM) comprising the sequence 5′-NTTN-3′.

[0245] In Embodiment 1, the target sequence may be within exon 1, exon 2, exon 3, exon 4, exon 5, exon 6, exon 7, or an intron of the STMN2 gene. In some examples, the STMN2 gene comprises the sequence of SEQ ID NO: 454, the reverse complement of SEQ ID NO: 454, a variant of SEQ ID NO: 454, or the reverse complement of a variant of SEQ ID NO: 454.

[0246] In Embodiment 1, the spacer sequence may comprise: (a) nucleotide 1 through nucleotide 16 of a sequence that is at least 90% identical to a sequence of any one of SEQ ID NOs: 229-446 or 2497-4502; (b) nucleotide 1 through nucleotide 17 of a sequence that is at least 90% identical to a sequence of any one of SEQ ID NOs: 229-446 or 2497-4502; (c) nucleotide 1 through nucleotide 18 of a sequence that is at least 90% identical to a sequence of any one of SEQ ID NOs: 229-446 or 2497-4502; (d) nucleotide 1 through nucleotide 19 of a sequence that is at least 90% identical to a sequence of any one of SEQ ID NOs: 229-446 or 2497-4502; I nucleotide 1 through nucleotide 20 of a sequence that is at least 90% identical to a sequence of any one of SEQ ID NOs: 229-446 or 2497-4502; (f) nucleotide 1 through nucleotide 21 of a sequence that is at least 90% identical to a sequence of any one of SEQ ID NOs: 229-446 or 2497-4502; (g) nucleotide 1 through nucleotide 22 of a sequence that is at least 90% identical to a sequence of any one of SEQ ID NOs: 229-446 or 2497-4502; (h) nucleotide 1 through nucleotide 23 of a sequence that is at least 90% identical to a sequence of any one of SEQ ID NOs: 229-446 or 2497-4502; (i) nucleotide 1 through nucleotide 24 of a sequence that is at least 90% identical to a sequence of any one of SEQ ID NOs: 229-446 or 2497-4502; (j) nucleotide 1 through nucleotide 25 of a sequence that is at least 90% identical to a sequence of any one of SEQ ID NOs: 229-446 or 2497-4502; (k) nucleotide 1 through nucleotide 26 of a sequence that is at least 90% identical to a sequence of any one of SEQ ID NOs: 229-446 or 2497-4502; (1) nucleotide 1 through nucleotide 27 of a sequence that is at least 90% identical to a sequence of any one of SEQ ID NOs: 229-446 or 2497-4502; (m) nucleotide 1 through nucleotide 28 of a sequence that is at least 90% identical to a sequence of any one of SEQ ID NOs: 229-446 or 2497-4502; (n) nucleotide 1 through nucleotide 29 of a sequence that is at least 90% identical to a sequence of any one of SEQ ID NOs: 229-446 or 2497-4502; or (o) nucleotide 1 through nucleotide 30 of a sequence that is at least 90% identical to a sequence of any one of SEQ ID NOs: 229-446 or 2497-4502.

[0247] In any of the compositions of Embodiment 1, the spacer sequence may comprise: (a) nucleotide 1 through nucleotide 16 of any one of SEQ ID NOs: 229-446 or 2497-4502; (b) nucleotide 1 through nucleotide 17 of any one of SEQ ID NOs: 229-446 or 2497-4502; (c) nucleotide 1 through nucleotide 18 of any one of SEQ ID NOs: 229-446 or 2497-4502; (d) nucleotide 1 through nucleotide 19 of any one of SEQ ID NOs: 229-446 or 2497-4502; (e) nucleotide 1 through nucleotide 20 of any one of SEQ ID NOs: 229-446 or 2497-4502; (f) nucleotide 1 through nucleotide 21 of any one of SEQ ID NOs: 229-446 or 2497-4502; (g) nucleotide 1 through nucleotide 22 of any one of SEQ ID NOs: 229-446 or 2497-4502; (h) nucleotide 1 through nucleotide 23 of any one of SEQ ID NOs: 229-446 or 2497-4502; (i) nucleotide 1 through nucleotide 24 of any one of SEQ ID NOs: 229-446 or 2497-4502; (j) nucleotide 1 through nucleotide 25 of any one of SEQ ID NOs: 229-446 or 2497-4502; (k) nucleotide 1 through nucleotide 26 of any one of SEQ ID NOs: 229-446 or 2497-4502; (1) nucleotide 1 through nucleotide 27 of any one of SEQ ID NOs: 229-446 or 2497-4502; (m) nucleotide 1 through nucleotide 28 of any one of SEQ ID NOs: 229-446 or 2497-4502; (n) nucleotide 1 through nucleotide 29 of any one of SEQ ID NOs: 229-446 or 2497-4502; or (o) nucleotide 1 through nucleotide 30 of any one of SEQ ID NOs: 229-446 or 2497-4502.

[0248] In any of the compositions of Embodiment 1, the direct repeat sequence may comprise: (a) nucleotide 1 through nucleotide 36 of a sequence that is at least 90% identical to a sequence of any one of SEQ ID NOs: 1-8; (b) nucleotide 2 through nucleotide 36 of a sequence that is at least 90% identical to a sequence of any one of SEQ ID NOs: 1-8; (c) nucleotide 3 through nucleotide 36 of a sequence that is at least 90% identical to a sequence of any one of SEQ ID NOs: 1-8; (d) nucleotide 4 through nucleotide 36 of a sequence that is at least 90% identical to a sequence of any one of SEQ ID NOs: 1-8; (e) nucleotide 5 through nucleotide 36 of a sequence that is at least 90% identical to a sequence of any one of SEQ ID NOs: 1-8; (f) nucleotide 6 through nucleotide 36 of a sequence that is at least 90% identical to a sequence of any one of SEQ ID NOs: 1-8; (g) nucleotide 7 through nucleotide 36 of a sequence that is at least 90% identical to a sequence of any one of SEQ ID NOs: 1-8; (h) nucleotide 8 through nucleotide 36 of a sequence that is at least 90% identical to a sequence of any one of SEQ ID NOs: 1-8; (i) nucleotide 9 through nucleotide 36 of a sequence that is at least 90% identical to a sequence of any one of SEQ ID NOs: 1-8; (j) nucleotide 10 through nucleotide 36 of a sequence that is at least 90% identical to a sequence of any one of SEQ ID NOs: 1-8; (k) nucleotide 11 through nucleotide 36 of a sequence that is at least 90% identical to a sequence of any one of SEQ ID NOs: 1-8; (1) nucleotide 12 through nucleotide 36 of a sequence that is at least 90% identical to a sequence of any one of SEQ ID NOs: 1-8; (m) nucleotide 13 through nucleotide 36 of a sequence that is at least 90% identical to a sequence of any one of SEQ ID NOs: 1-8; (n) nucleotide 14 through nucleotide 36 of a sequence that is at least 90% identical to a sequence of any one of SEQ ID NOs: 1-8; (o) nucleotide 1 through nucleotide 34 of a sequence that is at least 90% identical to a sequence of SEQ ID NO: 9; (p) nucleotide 2 through nucleotide 34 of a sequence that is at least 90% identical to a sequence of SEQ ID NO: 9; (q) nucleotide 3 through nucleotide 34 of a sequence that is at least 90% identical to a sequence of SEQ ID NO: 9; (r) nucleotide 4 through nucleotide 34 of a sequence that is at least 90% identical to a sequence of SEQ ID NO: 9; (s) nucleotide 5 through nucleotide 34 of a sequence that is at least 90% identical to a sequence of SEQ ID NO: 9; (t) nucleotide 6 through nucleotide 34 of a sequence that is at least 90% identical to a sequence of SEQ ID NO: 9; (u) nucleotide 7 through nucleotide 34 of a sequence that is at least 90% identical to a sequence of SEQ ID NO: 9; (v) nucleotide 8 through nucleotide 34 of a sequence that is at least 90% identical to a sequence of SEQ ID NO: 9; (w) nucleotide 9 through nucleotide 34 of a sequence that is at least 90% identical to a sequence of SEQ ID NO: 9; (x) nucleotide 10 through nucleotide 34 of a sequence that is at least 90% identical to a sequence of SEQ ID NO: 9; (y) nucleotide 11 through nucleotide 34 of a sequence that is at least 90% identical to a sequence of SEQ ID NO: 9; (z) nucleotide 12 through nucleotide 34 of a sequence that is at least 90% identical to a sequence of SEQ ID NO: 9; or (aa) a sequence that is at least 90% identical to a sequence of SEQ ID NO: 10 or a portion thereof.

[0249] In some examples, the direct repeat sequence comprises: (a) nucleotide 1 through nucleotide 36 of any one of SEQ ID NOs: 1-8; (b) nucleotide 2 through nucleotide 36 of any one of SEQ ID NOs: 1-8; (c) nucleotide 3 through nucleotide 36 of any one of SEQ ID NOs: 1-8; (d) nucleotide 4 through nucleotide 36 of any one of SEQ ID NOs: 1-8; (e) nucleotide 5 through nucleotide 36 of any one of SEQ ID NOs: 1-8; (f) nucleotide 6 through nucleotide 36 of any one of SEQ ID NOs: 1-8; (g) nucleotide 7 through nucleotide 36 of any one of SEQ ID NOs: 1-8; (h) nucleotide 8 through nucleotide 36 of any one of SEQ ID NOs: 1-8; (i) nucleotide 9 through nucleotide 36 of any one of SEQ ID NOs: 1-8; (j) nucleotide 10 through nucleotide 36 of any one of SEQ ID NOs: 1-8; (k) nucleotide 11 through nucleotide 36 of any one of SEQ ID NOs: 1-8; (1) nucleotide 12 through nucleotide 36 of any one of SEQ ID NOs: 1-8; (m) nucleotide 13 through nucleotide 36 of any one of SEQ ID NOs: 1-8; (n) nucleotide 14 through nucleotide 36 of any one of SEQ ID NOs: 1-8; (o) nucleotide 1 through nucleotide 34 of SEQ ID NO: 9; (p) nucleotide 2 through nucleotide 34 of SEQ ID NO: 9; (q) nucleotide 3 through nucleotide 34 of SEQ ID NO: 9; (r) nucleotide 4 through nucleotide 34 of SEQ ID NO: 9; (s) nucleotide 5 through nucleotide 34 of SEQ ID NO: 9; (t) nucleotide 6 through nucleotide 34 of SEQ ID NO: 9; (u) nucleotide 7 through nucleotide 34 of SEQ ID NO: 9; (v) nucleotide 8 through nucleotide 34 of SEQ ID NO: 9; (w) nucleotide 9 through nucleotide 34 of SEQ ID NO: 9; (x) nucleotide 10 through nucleotide 34 of SEQ ID NO: 9; (y) nucleotide 11 through nucleotide 34 of SEQ ID NO: 9; (z) nucleotide 12 through nucleotide 34 of SEQ ID NO: 9; or (aa) SEQ ID NO: 10 or a portion thereof.

[0250] In some examples, the direct repeat sequence comprises: (a) nucleotide 1 through nucleotide 36 of a sequence that is at least 90% identical to a sequence of any one of SEQ ID NOs: 462-479; (b) nucleotide 2 through nucleotide 36 of a sequence that is at least 90% identical to a sequence of any one of SEQ ID NOs: 462-479; (c) nucleotide 3 through nucleotide 36 of a sequence that is at least 90% identical to a sequence of any one of SEQ ID NOs: 462-479; (d) nucleotide 4 through nucleotide 36 of a sequence that is at least 90% identical to a sequence of any one of SEQ ID NOs: 462-479; (e) nucleotide 5 through nucleotide 36 of a sequence that is at least 90% identical to a sequence of any one of SEQ ID NOs: 462-479; (f) nucleotide 6 through nucleotide 36 of a sequence that is at least 90% identical to a sequence of any one of SEQ ID NOs: 462-479; (g) nucleotide 7 through nucleotide 36 of a sequence that is at least 90% identical to a sequence of any one of SEQ ID NOs: 462-479; (h) nucleotide 8 through nucleotide 36 of a sequence that is at least 90% identical to a sequence of any one of SEQ ID NOs: 462-479; (i) nucleotide 9 through nucleotide 36 of a sequence that is at least 90% identical to a sequence of any one of SEQ ID NOs: 462-479; (j) nucleotide 10 through nucleotide 36 of a sequence that is at least 90% identical to a sequence of any one of SEQ ID NOs: 462-479; (k) nucleotide 11 through nucleotide 36 of a sequence that is at least 90% identical to a sequence of any one of SEQ ID NOs: 462-479; (1) nucleotide 12 through nucleotide 36 of a sequence that is at least 90% identical to a sequence of any one of SEQ ID NOs: 462-479; (m) nucleotide 13 through nucleotide 36 of a sequence that is at least 90% identical to a sequence of any one of SEQ ID NOs: 462-479; (n) nucleotide 14 through nucleotide 36 of a sequence that is at least 90% identical to a sequence of any one of SEQ ID NOs: 462-479; or (o) a sequence that is at least 90% identical to a sequence of SEQ ID NO: 480 or a portion thereof.

[0251] In some examples, the direct repeat sequence comprises: (a) nucleotide 1 through nucleotide 36 of any one of SEQ ID NOs: 462-479; (b) nucleotide 2 through nucleotide 36 of any one of SEQ ID NOs: 462-479; (c) nucleotide 3 through nucleotide 36 of any one of SEQ ID NOs: 462-479; (d) nucleotide 4 through nucleotide 36 of any one of SEQ ID NOs: 462-479; (e) nucleotide 5 through nucleotide 36 of any one of SEQ ID NOs: 462-479; (f) nucleotide 6 through nucleotide 36 of any one of SEQ ID NOs: 462-479; (g) nucleotide 7 through nucleotide 36 of any one of SEQ ID NOs: 462-479; (h) nucleotide 8 through nucleotide 36 of any one of SEQ ID NOs: 462-479; (i) nucleotide 9 through nucleotide 36 of any one of SEQ ID NOs: 462-479; (j) nucleotide 10 through nucleotide 36 of any one of SEQ ID NOs: 462-479; (k) nucleotide 11 through nucleotide 36 of any one of SEQ ID NOs: 462-479; (1) nucleotide 12 through nucleotide 36 of any one of SEQ ID NOs: 462-479; (m) nucleotide 13 through nucleotide 36 of any one of SEQ ID NOs: 462-479; (n) nucleotide 14 through nucleotide 36 of any one of SEQ ID NOs: 462-479; or (o) SEQ ID NO: 480 or a portion thereof.

[0252] In some examples, the direct repeat sequence comprises: (a) nucleotide 1 through nucleotide 36 of a sequence that is at least 90% identical to SEQ ID NO: 485; (b) nucleotide 2 through nucleotide 36 of a sequence that is at least 90% identical to SEQ ID NO: 485; (c) nucleotide 3 through nucleotide 36 of a sequence that is at least 90% identical to SEQ ID NO: 485; (d) nucleotide 4 through nucleotide 36 of a sequence that is at least 90% identical to SEQ ID NO: 485; (e) nucleotide 5 through nucleotide 36 of a sequence that is at least 90% identical to SEQ ID NO: 485; (f) nucleotide 6 through nucleotide 36 of a sequence that is at least 90% identical to SEQ ID NO: 485; (g) nucleotide 7 through nucleotide 36 of a sequence that is at least 90% identical to SEQ ID NO: 485; (h) nucleotide 8 through nucleotide 36 of a sequence that is at least 90% identical to SEQ ID NO: 485; (i) nucleotide 9 through nucleotide 36 of a sequence that is at least 90% identical to SEQ ID NO: 485; (j) nucleotide 10 through nucleotide 36 of a sequence that is at least 90% identical to SEQ ID NO: 485; (k) nucleotide 11 through nucleotide 36 of a sequence that is at least 90% identical to SEQ ID NO: 485; (1) nucleotide 12 through nucleotide 36 of a sequence that is at least 90% identical to SEQ ID NO: 485; (m) nucleotide 13 through nucleotide 36 of a sequence that is at least 90% identical to SEQ ID NO: 485; (n) nucleotide 14 through nucleotide 36 of a sequence that is at least 90% identical to SEQ ID NO: 485; or (o) a sequence that is at least 90% identical to a sequence of SEQ ID NO: 486 or SEQ ID NO: 487 or a portion thereof.

[0253] In some examples, the direct repeat sequence comprises: (a) nucleotide 1 through nucleotide 36 of SEQ ID NO: 485; (b) nucleotide 2 through nucleotide 36 of SEQ ID NO: 485; (c) nucleotide 3 through nucleotide 36 of SEQ ID NO: 485; (d) nucleotide 4 through nucleotide 36 of SEQ ID NO: 485; (e) nucleotide 5 through nucleotide 36 of SEQ ID NO: 485; (f) nucleotide 6 through nucleotide 36 of SEQ ID NO: 485; (g) nucleotide 7 through nucleotide 36 of SEQ ID NO: 485; (h) nucleotide 8 through nucleotide 36 of SEQ ID NO: 485; (i) nucleotide 9 through nucleotide 36 of SEQ ID NO: 485; (j) nucleotide 10 through nucleotide 36 of SEQ ID NO: 485; (k) nucleotide 11 through nucleotide 36 of SEQ ID NO: 485; (1) nucleotide 12 through nucleotide 36 of SEQ ID NO: 485; (m) nucleotide 13 through nucleotide 36 of SEQ ID NO: 485; (n) nucleotide 14 through nucleotide 36 of SEQ ID NO: 485; or (o) SEQ ID NO: 486 or SEQ ID NO: 487 or a portion thereof.

[0254] In some examples, the direct repeat sequence comprises: (a) nucleotide 1 through nucleotide 36 of a sequence that is at least 90% identical to a sequence of SEQ ID NO: 488 or SEQ ID NO: 489; (b) nucleotide 2 through nucleotide 36 of a sequence that is at least 90% identical to a sequence of SEQ ID NO: 488 or SEQ ID NO: 489; (c) nucleotide 3 through nucleotide 36 of a sequence that is at least 90% identical to a sequence of SEQ ID NO: 488 or SEQ ID NO: 489; (d) nucleotide 4 through nucleotide 36 of a sequence that is at least 90% identical to a sequence of SEQ ID NO: 488 or SEQ ID NO: 489; (e) nucleotide 5 through nucleotide 36 of a sequence that is at least 90% identical to a sequence of SEQ ID NO: 488 or SEQ ID NO: 489; (f) nucleotide 6 through nucleotide 36 of a sequence that is at least 90% identical to a sequence of SEQ ID NO: 488 or SEQ ID NO: 489; (g) nucleotide 7 through nucleotide 36 of a sequence that is at least 90% identical to a sequence of SEQ ID NO: 488 or SEQ ID NO: 489; (h) nucleotide 8 through nucleotide 36 of a sequence that is at least 90% identical to a sequence of SEQ ID NO: 488 or SEQ ID NO: 489; (i) nucleotide 9 through nucleotide 36 of a sequence that is at least 90% identical to a sequence of SEQ ID NO: 488 or SEQ ID NO: 489; (j) nucleotide 10 through nucleotide 36 of a sequence that is at least 90% identical to a sequence of SEQ ID NO: 488 or SEQ ID NO: 489; (k) nucleotide 11 through nucleotide 36 of a sequence that is at least 90% identical to a sequence of SEQ ID NO: 488 or SEQ ID NO: 489; (1) nucleotide 12 through nucleotide 36 of a sequence that is at least 90% identical to a sequence of SEQ ID NO: 488 or SEQ ID NO: 489; (m) nucleotide 13 through nucleotide 36 of a sequence that is at least 90% identical to a sequence of SEQ ID NO: 488 or SEQ ID NO: 489; (n) nucleotide 14 through nucleotide 36 of a sequence that is at least 90% identical to a sequence of SEQ ID NO: 488 or SEQ ID NO: 489; (o) nucleotide 15 through nucleotide 36 of a sequence that is at least 90% identical to a sequence of SEQ ID NO: 488 or SEQ ID NO: 489; or (p) a sequence that is at least 90% identical to a sequence of SEQ ID NO: 490 or a portion thereof.

[0255] In some examples, the direct repeat sequence comprises: (a) nucleotide 1 through nucleotide 36 of SEQ ID NO: 488 or SEQ ID NO: 489; (b) nucleotide 2 through nucleotide 36 of SEQ ID NO: 488 or SEQ ID NO: 489; (c) nucleotide 3 through nucleotide 36 of SEQ ID NO: 488 or SEQ ID NO: 489; (d) nucleotide 4 through nucleotide 36 of SEQ ID NO: 488 or SEQ ID NO: 489; (e) nucleotide 5 through nucleotide 36 of SEQ ID NO: 488 or SEQ ID NO: 489; (f) nucleotide 6 through nucleotide 36 of SEQ ID NO: 488 or SEQ ID NO: 489; (g) nucleotide 7 through nucleotide 36 of SEQ ID NO: 488 or SEQ ID NO: 489; (h) nucleotide 8 through nucleotide 36 of SEQ ID NO: 488 or SEQ ID NO: 489; (i) nucleotide 9 through nucleotide 36 of SEQ ID NO: 488 or SEQ ID NO: 489; (j) nucleotide 10 through nucleotide 36 of SEQ ID NO: 488 or SEQ ID NO: 489; (k) nucleotide 11 through nucleotide 36 of SEQ ID NO: 488 or SEQ ID NO: 489; (1) nucleotide 12 through nucleotide 36 of SEQ ID NO: 488 or SEQ ID NO: 489; (m) nucleotide 13 through nucleotide 36 of SEQ ID NO: 488 or SEQ ID NO: 489; (n) nucleotide 14 through nucleotide 36 of SEQ ID NO: 488 or SEQ ID NO: 489; (o) nucleotide 15 through nucleotide 36 of SEQ ID NO: 488 or SEQ ID NO: 489; or (p) SEQ ID NO: 490 or a portion thereof.

[0256] In some examples, the spacer sequence is substantially complementary to the complement of a sequence of any one of SEQ ID NOs: 11-228 or 491-2496.

[0257] In any of the composition of Embodiment 1, the PAM may comprise the sequence 5′-ATTA-3′, 5′-ATTT-3′, 5′-ATTG-3′, 5′-ATTC-3′, 5′-TTTA-3′, 5′-TTTT-3′, 5′-TTTG-3′, 5′-TTTC-3′, 5′-GTTA-3′, 5′-GTTT-3′, 5′-GTTG-3′, 5′-GTTC-3′, 5′-CTTA-3′, 5′-CTTT-3′, 5′-CTTG-3′, or 5′-CTTC-3′.

[0258] In some examples, the target sequence is immediately adjacent to the PAM sequence.

[0259] In some examples, the RNA guide has a sequence that is at least 90% identical to a sequence of any one of SEQ ID NOs: 4505-4562.

[0260] In some examples, the RNA guide has the sequence of any one of SEQ ID NOs: 4505-4562.

[0261] Embodiment 2: The composition of Embodiment 1 may further comprise a Cas12i polypeptide or a polyribonucleotide encoding a Cas12i polypeptide, which can be one of the following: (a) a Cas12i2 polypeptide comprising a sequence that is at least 90% identical to the sequence of SEQ ID NO: 448, SEQ ID NO: 449, SEQ ID NO: 450, SEQ ID NO: 451, SEQ ID NO: 452, or SEQ ID NO: 453; (b) a Cas12i4 polypeptide comprising a sequence that is at least 90% identical to the sequence of SEQ ID NO: 482, SEQ ID NO: 483, or SEQ ID NO: 484; (c) a Cas12i1 polypeptide comprising a sequence that is at least 90% identical to the sequence of SEQ ID NO: 4503; or (d) a Cas12i3 polypeptide comprising a sequence that is at least 90% identical to the sequence of SEQ ID NO: 4504.

[0262] In specific examples, the Cas12i polypeptide is: (a) a Cas12i2 polypeptide comprising a sequence of SEQ ID NO: 448, SEQ ID NO: 449, SEQ ID NO: 450, SEQ ID NO: 451, SEQ ID NO: 452, or SEQ ID NO: 453; (b) a Cas12i4 polypeptide comprising a sequence of SEQ ID NO: 482, SEQ ID NO: 483, or SEQ ID NO: 484; (c) a Cas12i1 polypeptide comprising a sequence of SEQ ID NO: 4503; or (d) a Cas12i3 polypeptide comprising a sequence of SEQ ID NO: 4504.

[0263] In any of the compositions of Embodiment 2, the RNA guide and the Cas12i polypeptide may form a ribonucleoprotein complex. In some examples, the ribonucleoprotein complex binds a target nucleic acid. In some examples, the composition is present within a cell.

[0264] In any of the compositions of Embodiment 2, the RNA guide and the Cas12i polypeptide may be encoded in a vector, e.g., expression vector. In some examples, the RNA guide and the Cas12i polypeptide are encoded in a single vector. In other examples, the RNA guide is encoded in a first vector and the Cas12i polypeptide is encoded in a second vector.

[0265] Embodiment 3: A vector system comprising one or more vectors encoding an RNA guide disclosed herein and a Cas12i polypeptide. In some examples, the vector system comprises a first vector encoding an RNA guide disclosed herein and a second vector encoding a Cas12i polypeptide. The vectors may be expression vectors.

[0266] Embodiment 4: A composition comprising an RNA guide and a Cas12i polypeptide, wherein the RNA guide comprises (i) a spacer sequence that is substantially complementary or completely complementary to a region on a non-PAM strand (the complementary sequence of a target sequence) within an STMN2 gene, and (ii) a direct repeat sequence.

[0267] In some examples, the target sequence is within exon 1, exon 2, exon 3, exon 4, exon 5, exon 6, exon 7, or an intron of the STMN2 gene, which may comprise the sequence of SEQ ID NO: 454, the reverse complement of SEQ ID NO: 454, a variant of the sequence of SEQ ID NO: 454, or the reverse complement of a variant of SEQ ID NO: 454.

[0268] In some examples, the spacer sequence comprises: (a) nucleotide 1 through nucleotide 16 of a sequence that is at least 90% identical to a sequence of any one of SEQ ID NOs: 229-446 or 2497-4502; (b) nucleotide 1 through nucleotide 17 of a sequence that is at least 90% identical to a sequence of any one of SEQ ID NOs: 229-446 or 2497-4502; (c) nucleotide 1 through nucleotide 18 of a sequence that is at least 90% identical to a sequence of any one of SEQ ID NOs: 229-446 or 2497-4502; (d) nucleotide 1 through nucleotide 19 of a sequence that is at least 90% identical to a sequence of any one of SEQ ID NOs: 229-446 or 2497-4502; (e) nucleotide 1 through nucleotide 20 of a sequence that is at least 90% identical to a sequence of any one of SEQ ID NOs: 229-446 or 2497-4502; (f) nucleotide 1 through nucleotide 21 of a sequence that is at least 90% identical to a sequence of any one of SEQ ID NOs: 229-446 or 2497-4502; (g) nucleotide 1 through nucleotide 22 of a sequence that is at least 90% identical to a sequence of any one of SEQ ID NOs: 229-446 or 2497-4502; (h) nucleotide 1 through nucleotide 23 of a sequence that is at least 90% identical to a sequence of any one of SEQ ID NOs: 229-446 or 2497-4502; (i) nucleotide 1 through nucleotide 24 of a sequence that is at least 90% identical to a sequence of any one of SEQ ID NOs: 229-446 or 2497-4502; (j) nucleotide 1 through nucleotide 25 of a sequence that is at least 90% identical to a sequence of any one of SEQ ID NOs: 229-446 or 2497-4502; (k) nucleotide 1 through nucleotide 26 of a sequence that is at least 90% identical to a sequence of any one of SEQ ID NOs: 229-446 or 2497-4502; (1) nucleotide 1 through nucleotide 27 of a sequence that is at least 90% identical to a sequence of any one of SEQ ID NOs: 229-446 or 2497-4502; (m) nucleotide 1 through nucleotide 28 of a sequence that is at least 90% identical to a sequence of any one of SEQ ID NOs: 229-446 or 2497-4502; (n) nucleotide 1 through nucleotide 29 of a sequence that is at least 90% identical to a sequence of any one of SEQ ID NOs: 229-446 or 2497-4502; or (o) nucleotide 1 through nucleotide 30 of a sequence that is at least 90% identical to a sequence of any one of SEQ ID NOs: 229-446 or 2497-4502.

[0269] In some examples, the spacer sequence comprises: (a) nucleotide 1 through nucleotide 16 of any one of SEQ ID NOs: 229-446 or 2497-4502; (b) nucleotide 1 through nucleotide 17 of any one of SEQ ID NOs: 229-446 or 2497-4502; (c) nucleotide 1 through nucleotide 18 of any one of SEQ ID NOs: 229-446 or 2497-4502; (d) nucleotide 1 through nucleotide 19 of any one of SEQ ID NOs: 229-446 or 2497-4502; (e) nucleotide 1 through nucleotide 20 of any one of SEQ ID NOs: 229-446 or 2497-4502; (f) nucleotide 1 through nucleotide 21 of any one of SEQ ID NOs: 229-446 or 2497-4502; (g) nucleotide 1 through nucleotide 22 of any one of SEQ ID NOs: 229-446 or 2497-4502; (h) nucleotide 1 through nucleotide 23 of any one of SEQ ID NOs: 229-446 or 2497-4502; (i) nucleotide 1 through nucleotide 24 of any one of SEQ ID NOs: 229-446 or 2497-4502; (j) nucleotide 1 through nucleotide 25 of any one of SEQ ID NOs: 229-446 or 2497-4502; (k) nucleotide 1 through nucleotide 26 of any one of SEQ ID NOs: 229-446 or 2497-4502; (1) nucleotide 1 through nucleotide 27 of any one of SEQ ID NOs: 229-446 or 2497-4502; (m) nucleotide 1 through nucleotide 28 of any one of SEQ ID NOs: 229-446 or 2497-4502; (n) nucleotide 1 through nucleotide 29 of any one of SEQ ID NOs: 229-446 or 2497-4502; or (o) nucleotide 1 through nucleotide 30 of any one of SEQ ID NOs: 229-446 or 2497-4502.

[0270] In some examples, the direct repeat sequence comprises: (a) nucleotide 1 through nucleotide 36 of a sequence that is at least 90% identical to a sequence of any one of SEQ ID NOs: 1-8; (b) nucleotide 2 through nucleotide 36 of a sequence that is at least 90% identical to a sequence of any one of SEQ ID NOs: 1-8; (c) nucleotide 3 through nucleotide 36 of a sequence that is at least 90% identical to a sequence of any one of SEQ ID NOs: 1-8; (d) nucleotide 4 through nucleotide 36 of a sequence that is at least 90% identical to a sequence of any one of SEQ ID NOs: 1-8; (e) nucleotide 5 through nucleotide 36 of a sequence that is at least 90% identical to a sequence of any one of SEQ ID NOs: 1-8; (f) nucleotide 6 through nucleotide 36 of a sequence that is at least 90% identical to a sequence of any one of SIQ ID NOs: 1-8; (g) nucleotide 7 through nucleotide 36 of a sequence that is at least 90% identical to a sequence of any one of SEQ ID NOs: 1-8; (h) nucleotide 8 through nucleotide 36 of a sequence that is at least 90% identical to a sequence of any one of SEQ ID NOs: 1-8; (i) nucleotide 9 through nucleotide 36 of a sequence that is at least 90% identical to a sequence of any one of SEQ ID NOs: 1-8; (j) nucleotide 10 through nucleotide 36 of a sequence that is at least 90% identical to a sequence of any one of SEQ ID NOs: 1-8; (k) nucleotide 11 through nucleotide 36 of a sequence that is at least 90% identical to a sequence of any one of SEQ ID NOs: 1-8; (1) nucleotide 12 through nucleotide 36 of a sequence that is at least 90% identical to a sequence of any one of SEQ ID NOs: 1-8; (m) nucleotide 13 through nucleotide 36 of a sequence that is at least 90% identical to a sequence of any one of SEQ ID NOs: 1-8; (n) nucleotide 14 through nucleotide 36 of a sequence that is at least 90% identical to a sequence of any one of SEQ ID NOs: 1-8; (o) nucleotide 1 through nucleotide 34 of a sequence that is at least 90% identical to a sequence of SEQ ID NO: 9; (p) nucleotide 2 through nucleotide 34 of a sequence that is at least 90% identical to a sequence of SEQ ID NO: 9; (q) nucleotide 3 through nucleotide 34 of a sequence that is at least 90% identical to a sequence of SEQ ID NO: 9; (r) nucleotide 4 through nucleotide 34 of a sequence that is at least 90% identical to a sequence of SEQ ID NO: 9; (s) nucleotide 5 through nucleotide 34 of a sequence that is at least 90% identical to a sequence of SEQ ID NO: 9; (t) nucleotide 6 through nucleotide 34 of a sequence that is at least 90% identical to a sequence of SEQ ID NO: 9; (u) nucleotide 7 through nucleotide 34 of a sequence that is at least 90% identical to a sequence of SEQ ID NO: 9; (v) nucleotide 8 through nucleotide 34 of a sequence that is at least 90% identical to a sequence of SEQ ID NO: 9; (w) nucleotide 9 through nucleotide 34 of a sequence that is at least 90% identical to a sequence of SEQ ID NO: 9; (x) nucleotide 10 through nucleotide 34 of a sequence that is at least 90% identical to a sequence of SEQ ID NO: 9; (y) nucleotide 11 through nucleotide 34 of a sequence that is at least 90% identical to a sequence of SEQ ID NO: 9; (z) nucleotide 12 through nucleotide 34 of a sequence that is at least 90% identical to a sequence of SEQ ID NO: 9; or (aa) a sequence that is at least 90% identical to a sequence of SEQ ID NO: 10 or a portion thereof.

[0271] In some examples, the direct repeat sequence comprises: (a) nucleotide 1 through nucleotide 36 of any one of SEQ ID NOs: 1-8; (b) nucleotide 2 through nucleotide 36 of any one of SEQ ID NOs: 1-8; (c) nucleotide 3 through nucleotide 36 of any one of SEQ ID NOs: 1-8; (d) nucleotide 4 through nucleotide 36 of any one of SEQ ID NOs: 1-8; (e) nucleotide 5 through nucleotide 36 of any one of SEQ ID NOs: 1-8; (f) nucleotide 6 through nucleotide 36 of any one of SEQ ID NOs: 1-8; (g) nucleotide 7 through nucleotide 36 of any one of SEQ ID NOs: 1-8; (h) nucleotide 8 through nucleotide 36 of any one of SEQ ID NOs: 1-8; (i) nucleotide 9 through nucleotide 36 of any one of SEQ ID NOs: 1-8; (j) nucleotide 10 through nucleotide 36 of any one of SEQ ID NOs: 1-8; (k) nucleotide 11 through nucleotide 36 of any one of SEQ ID NOs: 1-8; (1) nucleotide 12 through nucleotide 36 of any one of SEQ ID NOs: 1-8; (m) nucleotide 13 through nucleotide 36 of any one of SEQ ID NOs: 1-8; (n) nucleotide 14 through nucleotide 36 of any one of SEQ ID NOs: 1-8; (o) nucleotide 1 through nucleotide 34 of SEQ ID NO: 9; (p) nucleotide 2 through nucleotide 34 of SEQ ID NO: 9; (q) nucleotide 3 through nucleotide 34 of SEQ ID NO: 9; (r) nucleotide 4 through nucleotide 34 of SEQ ID NO: 9; (s) nucleotide 5 through nucleotide 34 of SEQ ID NO: 9; (t) nucleotide 6 through nucleotide 34 of SEQ ID NO: 9; (u) nucleotide 7 through nucleotide 34 of SEQ ID NO: 9; (v) nucleotide 8 through nucleotide 34 of SEQ ID NO: 9; (w) nucleotide 9 through nucleotide 34 of SEQ ID NO: 9; (x) nucleotide 10 through nucleotide 34 of SEQ ID NO: 9; (y) nucleotide 11 through nucleotide 34 of SEQ ID NO: 9; (z) nucleotide 12 through nucleotide 34 of SEQ ID NO: 9; or (aa) SEQ ID NO: 10 or a portion thereof.

[0272] In some examples, the direct repeat sequence comprises: (a) nucleotide 1 through nucleotide 36 of a sequence that is at least 90% identical to a sequence of any one of SEQ ID NOs: 462-479; (b) nucleotide 2 through nucleotide 36 of a sequence that is at least 90% identical to a sequence of any one of SEQ ID NOs: 462-479; (c) nucleotide 3 through nucleotide 36 of a sequence that is at least 90% identical to a sequence of any one of SEQ ID NOs: 462-479; (d) nucleotide 4 through nucleotide 36 of a sequence that is at least 90% identical to a sequence of any one of SEQ ID NOs: 462-479; (e) nucleotide 5 through nucleotide 36 of a sequence that is at least 90% identical to a sequence of any one of SEQ ID NOs: 462-479; (f) nucleotide 6 through nucleotide 36 of a sequence that is at least 90% identical to a sequence of any one of SEQ ID NOs: 462-479; (g) nucleotide 7 through nucleotide 36 of a sequence that is at least 90% identical to a sequence of any one of SEQ ID NOs: 462-479; (h) nucleotide 8 through nucleotide 36 of a sequence that is at least 90% identical to a sequence of any one of SEQ ID NOs: 462-479; (i) nucleotide 9 through nucleotide 36 of a sequence that is at least 90% identical to a sequence of any one of SEQ ID NOs: 462-479; (j) nucleotide 10 through nucleotide 36 of a sequence that is at least 90% identical to a sequence of any one of SEQ ID NOs: 462-479; (k) nucleotide 11 through nucleotide 36 of a sequence that is at least 90% identical to a sequence of any one of SEQ ID NOs: 462-479; (1) nucleotide 12 through nucleotide 36 of a sequence that is at least 90% identical to a sequence of any one of SEQ ID NOs: 462-479; (m) nucleotide 13 through nucleotide 36 of a sequence that is at least 90% identical to a sequence of any one of SEQ ID NOs: 462-479; (n) nucleotide 14 through nucleotide 36 of a sequence that is at least 90% identical to a sequence of any one of SEQ ID NOs: 462-479; or (o) a sequence that is at least 90% identical to a sequence of SEQ ID NO: 480 or a portion thereof.

[0273] In some examples, the direct repeat sequence comprises: (a) nucleotide 1 through nucleotide 36 of any one of SEQ ID NOs: 462-479; (b) nucleotide 2 through nucleotide 36 of any one of SEQ ID NOs: 462-479; (c) nucleotide 3 through nucleotide 36 of any one of SEQ ID NOs: 462-479; (d) nucleotide 4 through nucleotide 36 of any one of SEQ ID NOs: 462-479; (e) nucleotide 5 through nucleotide 36 of any one of SEQ ID NOs: 462-479; (f) nucleotide 6 through nucleotide 36 of any one of SEQ ID NOs: 462-479; (g) nucleotide 7 through nucleotide 36 of any one of SEQ ID NOs: 462-479; (h) nucleotide 8 through nucleotide 36 of any one of SEQ ID NOs: 462-479; (i) nucleotide 9 through nucleotide 36 of any one of SEQ ID NOs: 462-479; (j) nucleotide 10 through nucleotide 36 of any one of SEQ ID NOs: 462-479; (k) nucleotide 11 through nucleotide 36 of any one of SEQ ID NOs: 462-479; (1) nucleotide 12 through nucleotide 36 of any one of SEQ ID NOs: 462-479; (m) nucleotide 13 through nucleotide 36 of any one of SEQ ID NOs: 462-479; (n) nucleotide 14 through nucleotide 36 of any one of SEQ ID NOs: 462-479; or (o) SEQ ID NO: 480 or a portion thereof.

[0274] In some examples, the direct repeat sequence comprises: (a) nucleotide 1 through nucleotide 36 of a sequence that is at least 90% identical to SEQ ID NO: 485; (b) nucleotide 2 through nucleotide 36 of a sequence that is at least 90% identical to SEQ ID NO: 485; (c) nucleotide 3 through nucleotide 36 of a sequence that is at least 90% identical to SEQ ID NO: 485; (d) nucleotide 4 through nucleotide 36 of a sequence that is at least 90% identical to SEQ ID NO: 485; (e) nucleotide 5 through nucleotide 36 of a sequence that is at least 90% identical to SEQ ID NO: 485; (f) nucleotide 6 through nucleotide 36 of a sequence that is at least 90% identical to SEQ ID NO: 485; (g) nucleotide 7 through nucleotide 36 of a sequence that is at least 90% identical to SEQ ID NO: 485; (h) nucleotide 8 through nucleotide 36 of a sequence that is at least 90% identical to SEQ ID NO: 485; (i) nucleotide 9 through nucleotide 36 of a sequence that is at least 90% identical to SEQ ID NO: 485; (j) nucleotide 10 through nucleotide 36 of a sequence that is at least 90% identical to SEQ ID NO: 485; (k) nucleotide 11 through nucleotide 36 of a sequence that is at least 90% identical to SEQ ID NO: 485; (1) nucleotide 12 through nucleotide 36 of a sequence that is at least 90% identical to SEQ ID NO: 485; (m) nucleotide 13 through nucleotide 36 of a sequence that is at least 90% identical to SEQ ID NO: 485; (n) nucleotide 14 through nucleotide 36 of a sequence that is at least 90% identical to SEQ ID NO: 485; or (o) a sequence that is at least 90% identical to a sequence of SEQ ID NO: 486 or SEQ ID NO: 487 or a portion thereof.

[0275] In some examples, the direct repeat sequence comprises: (a) nucleotide 1 through nucleotide 36 of SEQ ID NO: 485; (b) nucleotide 2 through nucleotide 36 of SEQ ID NO: 485; (c) nucleotide 3 through nucleotide 36 of SEQ ID NO: 485; (d) nucleotide 4 through nucleotide 36 of SEQ ID NO: 485; (e) nucleotide 5 through nucleotide 36 of SEQ ID NO: 485; (f) nucleotide 6 through nucleotide 36 of SEQ ID NO: 485; (g) nucleotide 7 through nucleotide 36 of SEQ ID NO: 485; (h) nucleotide 8 through nucleotide 36 of SEQ ID NO: 485; (i) nucleotide 9 through nucleotide 36 of SEQ ID NO: 485; (j) nucleotide 10 through nucleotide 36 of SEQ ID NO: 485; (k) nucleotide 11 through nucleotide 36 of SEQ ID NO: 485; (1) nucleotide 12 through nucleotide 36 of SEQ ID NO: 485; (m) nucleotide 13 through nucleotide 36 of SEQ ID NO: 485; (n) nucleotide 14 through nucleotide 36 of SEQ ID NO: 485; or (o) SEQ ID NO: 486 or SEQ ID NO: 487 or a portion thereof.

[0276] In some examples, the direct repeat sequence comprises: (a) nucleotide 1 through nucleotide 36 of a sequence that is at least 90% identical to a sequence of SEQ ID NO: 488 or SEQ ID NO: 489; (b) nucleotide 2 through nucleotide 36 of a sequence that is at least 90% identical to a sequence of SEQ ID NO: 488 or SEQ ID NO: 489; (c) nucleotide 3 through nucleotide 36 of a sequence that is at least 90% identical to a sequence of SEQ ID NO: 488 or SEQ ID NO: 489; (d) nucleotide 4 through nucleotide 36 of a sequence that is at least 90% identical to a sequence of SEQ ID NO: 488 or SEQ ID NO: 489; (e) nucleotide 5 through nucleotide 36 of a sequence that is at least 90% identical to a sequence of SEQ ID NO: 488 or SEQ ID NO: 489; (f) nucleotide 6 through nucleotide 36 of a sequence that is at least 90% identical to a sequence of SEQ ID NO: 488 or SEQ ID NO: 489; (g) nucleotide 7 through nucleotide 36 of a sequence that is at least 90% identical to a sequence of SEQ ID NO: 488 or SEQ ID NO: 489; (h) nucleotide 8 through nucleotide 36 of a sequence that is at least 90% identical to a sequence of SEQ ID NO: 488 or SEQ ID NO: 489; (i) nucleotide 9 through nucleotide 36 of a sequence that is at least 90% identical to a sequence of SEQ ID NO: 488 or SEQ ID NO: 489; (j) nucleotide 10 through nucleotide 36 of a sequence that is at least 90% identical to a sequence of SEQ ID NO: 488 or SEQ ID NO: 489; (k) nucleotide 11 through nucleotide 36 of a sequence that is at least 90% identical to a sequence of SEQ ID NO: 488 or SEQ ID NO: 489; (1) nucleotide 12 through nucleotide 36 of a sequence that is at least 90% identical to a sequence of SEQ ID NO: 488 or SEQ ID NO: 489; (m) nucleotide 13 through nucleotide 36 of a sequence that is at least 90% identical to a sequence of SEQ ID NO: 488 or SEQ ID NO: 489; (n) nucleotide 14 through nucleotide 36 of a sequence that is at least 90% identical to a sequence of SEQ ID NO: 488 or SEQ ID NO: 489; (o) nucleotide 15 through nucleotide 36 of a sequence that is at least 90% identical to a sequence of SEQ ID NO: 488 or SEQ ID NO: 489; or (p) a sequence that is at least 90% identical to a sequence of SEQ ID NO: 490 or a portion thereof.

[0277] In some examples, the direct repeat sequence comprises: (a) nucleotide 1 through nucleotide 36 of SEQ ID NO: 488 or SEQ ID NO: 489; (b) nucleotide 2 through nucleotide 36 of SEQ ID NO: 488 or SEQ ID NO: 489; (c) nucleotide 3 through nucleotide 36 of SEQ ID NO: 488 or SEQ ID NO: 489; (d) nucleotide 4 through nucleotide 36 of SEQ ID NO: 488 or SEQ ID NO: 489; (e) nucleotide 5 through nucleotide 36 of SEQ ID NO: 488 or SEQ ID NO: 489; (f) nucleotide 6 through nucleotide 36 of SEQ ID NO: 488 or SEQ ID NO: 489; (g) nucleotide 7 through nucleotide 36 of SEQ ID NO: 488 or SEQ ID NO: 489; (h) nucleotide 8 through nucleotide 36 of SEQ ID NO: 488 or SEQ ID NO: 489; (i) nucleotide 9 through nucleotide 36 of SEQ ID NO: 488 or SEQ ID NO: 489; (j) nucleotide 10 through nucleotide 36 of SEQ ID NO: 488 or SEQ ID NO: 489; (k) nucleotide 11 through nucleotide 36 of SEQ ID NO: 488 or SEQ ID NO: 489; (1) nucleotide 12 through nucleotide 36 of SEQ ID NO: 488 or SEQ ID NO: 489; (m) nucleotide 13 through nucleotide 36 of SEQ ID NO: 488 or SEQ ID NO: 489; (n) nucleotide 14 through nucleotide 36 of SEQ ID NO: 488 or SEQ ID NO: 489; (o) nucleotide 15 through nucleotide 36 of SEQ ID NO: 488 or SEQ ID NO: 489; or (p) SEQ ID NO: 490 or a portion thereof.

[0278] In any of the compositions of Embodiment 4, the spacer sequence may be substantially complementary to the complement of a sequence of any one of SEQ ID NOs: 11-228 or 491-2496.

[0279] In some examples, the target sequence is adjacent to a protospacer adjacent motif (PAM) comprising the sequence 5′-NTTN-3′. In some examples, the PAM comprises the sequence 5′-ATTA-3′, 5′-ATTT-3′, 5′-ATTG-3′, 5′-ATTC-3′, 5′-TTTA-3′, 5′-TTTT-3′, 5′-TTTG-3′, 5′-TTTC-3′, 5′-GTTA-3′, 5′-GTTT-3′, 5′-GTTG-3′, 5′-GTTC-3′, 5′-CTTA-3′, 5′-CTTT-3′, 5′-CTTG-3′, or 5′-CTTC-3′.

[0280] In some examples, the target sequence is immediately adjacent to the PAM sequence. In some examples, the target sequence is within 1, 2, 3, 4, or 5 nucleotides of the PAM sequence.

[0281] In any of the compositions of Embodiment 4, the Cas12i polypeptide is: (a) a Cas12i2 polypeptide comprising a sequence that is at least 90% identical to the sequence of SEQ ID NO: 448, SEQ ID NO: 449, SEQ ID NO: 450, SEQ ID NO: 451, SEQ ID NO: 452, or SEQ ID NO: 453; (b) a Cas12i4 polypeptide comprising a sequence that is at least 90% identical to the sequence of SEQ ID NO: 482, SEQ ID NO: 483, or SEQ ID NO: 484; (c) a Cas12i1 polypeptide comprising a sequence that is at least 90% identical to the sequence of SEQ ID NO: 4503; or (d) a Cas12i3 polypeptide comprising a sequence that is at least 90% identical to the sequence of SEQ ID NO: 4504.

[0282] In some examples, the Cas12i polypeptide is: (a) a Cas12i2 polypeptide comprising a sequence of SEQ ID NO: 448, SEQ ID NO: 449, SEQ ID NO: 450, SEQ ID NO: 451, SEQ ID NO: 452, or SEQ ID NO: 453; (b) a Cas12i4 polypeptide comprising a sequence of SEQ ID NO: 482, SEQ ID NO: 483, or SEQ ID NO: 484; (c) a Cas12i1 polypeptide comprising a sequence of SEQ ID NO: 4503; or (d) a Cas12i3 polypeptide comprising a sequence of SEQ ID NO: 4504.

[0283] In any of the composition of Embodiment 4, the RNA guide and the Cas12i polypeptide may form a ribonucleoprotein complex. In some examples, the ribonucleoprotein complex binds a target nucleic acid.

[0284] In any of the composition of Embodiment 4, the composition may be present within a cell.

[0285] In any of the composition of Embodiment 4, the RNA guide and the Cas12i polypeptide may be encoded in a vector, e.g., expression vector. In some examples, the RNA guide and the Cas12i polypeptide are encoded in a single vector. In other examples, the RNA guide is encoded in a first vector and the Cas12i polypeptide is encoded in a second vector.

[0286] Embodiment 5: A vector system comprising one or more vectors encoding an RNA guide disclosed herein and a Cas12i polypeptide. In some examples, the vector system comprises a first vector encoding an RNA guide disclosed herein and a second vector encoding a Cas12i polypeptide. In some examples, the vectors are expression vectors.

[0287] Embodiment 6: An RNA guide comprising (i) a spacer sequence that is substantially complementary or completely complementary to a region on a non-PAM strand (the complementary sequence of a target sequence) within an STMN2 gene, and (ii) a direct repeat sequence.

[0288] In some examples, the target sequence is within exon 1, exon 2, exon 3, exon 4, exon 5, exon 6, exon 7, or an intron of the STMN2 gene, which may comprise the sequence of SEQ ID NO: 454, the reverse complement of SEQ ID NO: 454, a variant of the sequence of SEQ ID NO: 454, or the reverse complement of a variant of SEQ ID NO: 454.

[0289] In some examples, the spacer sequence comprises: (a) nucleotide 1 through nucleotide 16 of a sequence that is at least 90% identical to a sequence of any one of SEQ ID NOs: 229-446 or 2497-4502; (b) nucleotide 1 through nucleotide 17 of a sequence that is at least 90% identical to a sequence of any one of SEQ ID NOs: 229-446 or 2497-4502; (c) nucleotide 1 through nucleotide 18 of a sequence that is at least 90% identical to a sequence of any one of SEQ ID NOs: 229-446 or 2497-4502; (d) nucleotide 1 through nucleotide 19 of a sequence that is at least 90% identical to a sequence of any one of SEQ ID NOs: 229-446 or 2497-4502; (e) nucleotide 1 through nucleotide 20 of a sequence that is at least 90% identical to a sequence of any one of SEQ ID NOs: 229-446 or 2497-4502; (f) nucleotide 1 through nucleotide 21 of a sequence that is at least 90% identical to a sequence of any one of SEQ ID NOs: 229-446 or 2497-4502; (g) nucleotide 1 through nucleotide 22 of a sequence that is at least 90% identical to a sequence of any one of SEQ ID NOs: 229-446 or 2497-4502; (h) nucleotide 1 through nucleotide 23 of a sequence that is at least 90% identical to a sequence of any one of SEQ ID NOs: 229-446 or 2497-4502; (i) nucleotide 1 through nucleotide 24 of a sequence that is at least 90% identical to a sequence of any one of SEQ ID NOs: 229-446 or 2497-4502; (j) nucleotide 1 through nucleotide 25 of a sequence that is at least 90% identical to a sequence of any one of SEQ ID NOs: 229-446 or 2497-4502; (k) nucleotide 1 through nucleotide 26 of a sequence that is at least 90% identical to a sequence of any one of SEQ ID NOs: 229-446 or 2497-4502; (1) nucleotide 1 through nucleotide 27 of a sequence that is at least 90% identical to a sequence of any one of SEQ ID NOs: 229-446 or 2497-4502; (m) nucleotide 1 through nucleotide 28 of a sequence that is at least 90% identical to a sequence of any one of SEQ ID NOs: 229-446 or 2497-4502; (n) nucleotide 1 through nucleotide 29 of a sequence that is at least 90% identical to a sequence of any one of SEQ ID NOs: 229-446 or 2497-4502; or (o) nucleotide 1 through nucleotide 30 of a sequence that is at least 90% identical to a sequence of any one of SEQ ID NOs: 229-446 or 2497-4502.

[0290] In some examples, the spacer sequence comprises: (a) nucleotide 1 through nucleotide 16 of any one of SEQ ID NOs: 229-446 or 2497-4502; (b) nucleotide 1 through nucleotide 17 of any one of SEQ ID NOs: 229-446 or 2497-4502; (c) nucleotide 1 through nucleotide 18 of any one of SEQ ID NOs: 229-446 or 2497-4502; (d) nucleotide 1 through nucleotide 19 of any one of SEQ ID NOs: 229-446 or 2497-4502; (e) nucleotide 1 through nucleotide 20 of any one of SEQ ID NOs: 229-446 or 2497-4502; (f) nucleotide 1 through nucleotide 21 of any one of SEQ ID NOs: 229-446 or 2497-4502; (g) nucleotide 1 through nucleotide 22 of any one of SEQ ID NOs: 229-446 or 2497-4502; (h) nucleotide 1 through nucleotide 23 of any one of SEQ ID NOs: 229-446 or 2497-4502; (i) nucleotide 1 through nucleotide 24 of any one of SEQ ID NOs: 229-446 or 2497-4502; (j) nucleotide 1 through nucleotide 25 of any one of SEQ ID NOs: 229-446 or 2497-4502; (k) nucleotide 1 through nucleotide 26 of any one of SEQ ID NOs: 229-446 or 2497-4502; (1) nucleotide 1 through nucleotide 27 of any one of SEQ ID NOs: 229-446 or 2497-4502; (m) nucleotide 1 through nucleotide 28 of any one of SEQ ID NOs: 229-446 or 2497-4502; (n) nucleotide 1 through nucleotide 29 of any one of SEQ ID NOs: 229-446 or 2497-4502; or (o) nucleotide 1 through nucleotide 30 of any one of SEQ ID NOs: 229-446 or 2497-4502.

[0291] In some examples, the direct repeat sequence comprises: (a) nucleotide 1 through nucleotide 36 of a sequence that is at least 90% identical to a sequence of any one of SEQ ID NOs: 1-8; (b) nucleotide 2 through nucleotide 36 of a sequence that is at least 90% identical to a sequence of any one of SEQ ID NOs: 1-8; (c) nucleotide 3 through nucleotide 36 of a sequence that is at least 90% identical to a sequence of any one of SEQ ID NOs: 1-8; (d) nucleotide 4 through nucleotide 36 of a sequence that is at least 90% identical to a sequence of any one of SEQ ID NOs: 1-8; (e) nucleotide 5 through nucleotide 36 of a sequence that is at least 90% identical to a sequence of any one of SEQ ID NOs: 1-8; (f) nucleotide 6 through nucleotide 36 of a sequence that is at least 90% identical to a sequence of any one of SEQ ID NOs: 1-8; (g) nucleotide 7 through nucleotide 36 of a sequence that is at least 90% identical to a sequence of any one of SEQ ID NOs: 1-8; (h) nucleotide 8 through nucleotide 36 of a sequence that is at least 90% identical to a sequence of any one of SEQ ID NOs: 1-8; (i) nucleotide 9 through nucleotide 36 of a sequence that is at least 90% identical to a sequence of any one of SEQ ID NOs: 1-8; (j) nucleotide 10 through nucleotide 36 of a sequence that is at least 90% identical to a sequence of any one of SEQ ID NOs: 1-8; (k) nucleotide 11 through nucleotide 36 of a sequence that is at least 90% identical to a sequence of any one of SEQ ID NOs: 1-8; (1) nucleotide 12 through nucleotide 36 of a sequence that is at least 90% identical to a sequence of any one of SEQ ID NOs: 1-8; (m) nucleotide 13 through nucleotide 36 of a sequence that is at least 90% identical to a sequence of any one of SEQ ID NOs: 1-8; (n) nucleotide 14 through nucleotide 36 of a sequence that is at least 90% identical to a sequence of any one of SEQ ID NOs: 1-8; (o) nucleotide 1 through nucleotide 34 of a sequence that is at least 90% identical to a sequence of SEQ ID NO: 9; (p) nucleotide 2 through nucleotide 34 of a sequence that is at least 90% identical to a sequence of SEQ ID NO: 9; (q) nucleotide 3 through nucleotide 34 of a sequence that is at least 90% identical to a sequence of SEQ ID NO: 9; (r) nucleotide 4 through nucleotide 34 of a sequence that is at least 90% identical to a sequence of SEQ ID NO: 9; (s) nucleotide 5 through nucleotide 34 of a sequence that is at least 90% identical to a sequence of SEQ ID NO: 9; (t) nucleotide 6 through nucleotide 34 of a sequence that is at least 90% identical to a sequence of SEQ ID NO: 9; (u) nucleotide 7 through nucleotide 34 of a sequence that is at least 90% identical to a sequence of SEQ ID NO: 9; (v) nucleotide 8 through nucleotide 34 of a sequence that is at least 90% identical to a sequence of SEQ ID NO: 9; (w) nucleotide 9 through nucleotide 34 of a sequence that is at least 90% identical to a sequence of SEQ ID NO: 9; (x) nucleotide 10 through nucleotide 34 of a sequence that is at least 90% identical to a sequence of SEQ ID NO: 9; (y) nucleotide 11 through nucleotide 34 of a sequence that is at least 90% identical to a sequence of SEQ ID NO: 9; (z) nucleotide 12 through nucleotide 34 of a sequence that is at least 90% identical to a sequence of SEQ ID NO: 9; or (aa) a sequence that is at least 90% identical to a sequence of SEQ ID NO: 10 or a portion thereof.

[0292] In some examples, the direct repeat sequence comprises: (a) nucleotide 1 through nucleotide 36 of any one of SEQ ID NOs: 1-8; (b) nucleotide 2 through nucleotide 36 of any one of SEQ ID NOs: 1-8; (c) nucleotide 3 through nucleotide 36 of any one of SEQ ID NOs: 1-8; (d) nucleotide 4 through nucleotide 36 of any one of SEQ ID NOs: 1-8; (e) nucleotide 5 through nucleotide 36 of any one of SEQ ID NOs: 1-8; (f) nucleotide 6 through nucleotide 36 of any one of SEQ ID NOs: 1-8; (g) nucleotide 7 through nucleotide 36 of any one of SEQ ID NOs: 1-8; (h) nucleotide 8 through nucleotide 36 of any one of SEQ ID NOs: 1-8; (i) nucleotide 9 through nucleotide 36 of any one of SEQ ID NOs: 1-8; (j) nucleotide 10 through nucleotide 36 of any one of SEQ ID NOs: 1-8; (k) nucleotide 11 through nucleotide 36 of any one of SEQ ID NOs: 1-8; (1) nucleotide 12 through nucleotide 36 of any one of SEQ ID NOs: 1-8; (m) nucleotide 13 through nucleotide 36 of any one of SEQ ID NOs: 1-8; (n) nucleotide 14 through nucleotide 36 of any one of SEQ ID NOs: 1-8; (o) nucleotide 1 through nucleotide 34 of SEQ ID NO: 9; (p) nucleotide 2 through nucleotide 34 of SEQ ID NO: 9; (q) nucleotide 3 through nucleotide 34 of SEQ ID NO: 9; (r) nucleotide 4 through nucleotide 34 of SEQ ID NO: 9; (s) nucleotide 5 through nucleotide 34 of SEQ ID NO: 9; (t) nucleotide 6 through nucleotide 34 of SEQ ID NO: 9; (u) nucleotide 7 through nucleotide 34 of SEQ ID NO: 9; (v) nucleotide 8 through nucleotide 34 of SEQ ID NO: 9; (w) nucleotide 9 through nucleotide 34 of SEQ ID NO: 9; (x) nucleotide 10 through nucleotide 34 of SEQ ID NO: 9; (y) nucleotide 11 through nucleotide 34 of SEQ ID NO: 9; (z) nucleotide 12 through nucleotide 34 of SEQ ID NO: 9; or (aa) SEQ ID NO: 10 or a portion thereof.

[0293] In some examples, the direct repeat sequence comprises: (a) nucleotide 1 through nucleotide 36 of a sequence that is at least 90% identical to a sequence of any one of SEQ ID NOs: 462-479; (b) nucleotide 2 through nucleotide 36 of a sequence that is at least 90% identical to a sequence of any one of SEQ ID NOs: 462-479; (c) nucleotide 3 through nucleotide 36 of a sequence that is at least 90% identical to a sequence of any one of SEQ ID NOs: 462-479; (d) nucleotide 4 through nucleotide 36 of a sequence that is at least 90% identical to a sequence of any one of SEQ ID NOs: 462-479; (e) nucleotide 5 through nucleotide 36 of a sequence that is at least 90% identical to a sequence of any one of SEQ ID NOs: 462-479; (f) nucleotide 6 through nucleotide 36 of a sequence that is at least 90% identical to a sequence of any one of SEQ ID NOs: 462-479; (g) nucleotide 7 through nucleotide 36 of a sequence that is at least 90% identical to a sequence of any one of SEQ ID NOs: 462-479; (h) nucleotide 8 through nucleotide 36 of a sequence that is at least 90% identical to a sequence of any one of SEQ ID NOs: 462-479; (i) nucleotide 9 through nucleotide 36 of a sequence that is at least 90% identical to a sequence of any one of SEQ ID NOs: 462-479; (j) nucleotide 10 through nucleotide 36 of a sequence that is at least 90% identical to a sequence of any one of SEQ ID NOs: 462-479; (k) nucleotide 11 through nucleotide 36 of a sequence that is at least 90% identical to a sequence of any one of SEQ ID NOs: 462-479; (1) nucleotide 12 through nucleotide 36 of a sequence that is at least 90% identical to a sequence of any one of SEQ ID NOs: 462-479; (m) nucleotide 13 through nucleotide 36 of a sequence that is at least 90% identical to a sequence of any one of SEQ ID NOs: 462-479; (n) nucleotide 14 through nucleotide 36 of a sequence that is at least 90% identical to a sequence of any one of SEQ ID NOs: 462-479; or (o) a sequence that is at least 90% identical to a sequence of SEQ ID NO: 480 or a portion thereof.

[0294] In some examples, the direct repeat sequence comprises: (a) nucleotide 1 through nucleotide 36 of any one of SEQ ID NOs: 462-479; (b) nucleotide 2 through nucleotide 36 of any one of SEQ ID NOs: 462-479; (c) nucleotide 3 through nucleotide 36 of any one of SEQ ID NOs: 462-479; (d) nucleotide 4 through nucleotide 36 of any one of SEQ ID NOs: 462-479; (e) nucleotide 5 through nucleotide 36 of any one of SEQ ID NOs: 462-479; (f) nucleotide 6 through nucleotide 36 of any one of SEQ ID NOs: 462-479; (g) nucleotide 7 through nucleotide 36 of any one of SEQ ID NOs: 462-479; (h) nucleotide 8 through nucleotide 36 of any one of SEQ ID NOs: 462-479; (i) nucleotide 9 through nucleotide 36 of any one of SEQ ID NOs: 462-479; (j) nucleotide 10 through nucleotide 36 of any one of SEQ ID NOs: 462-479; (k) nucleotide 11 through nucleotide 36 of any one of SEQ ID NOs: 462-479; (1) nucleotide 12 through nucleotide 36 of any one of SEQ ID NOs: 462-479; (m) nucleotide 13 through nucleotide 36 of any one of SEQ ID NOs: 462-479; (n) nucleotide 14 through nucleotide 36 of any one of SEQ ID NOs: 462-479; or (o) SEQ ID NO: 480 or a portion thereof.

[0295] In some examples, the direct repeat sequence comprises: (a) nucleotide 1 through nucleotide 36 of a sequence that is at least 90% identical to SEQ ID NO: 485; (b) nucleotide 2 through nucleotide 36 of a sequence that is at least 90% identical to SEQ ID NO: 485; (c) nucleotide 3 through nucleotide 36 of a sequence that is at least 90% identical to SEQ ID NO: 485; (d) nucleotide 4 through nucleotide 36 of a sequence that is at least 90% identical to SEQ ID NO: 485; (e) nucleotide 5 through nucleotide 36 of a sequence that is at least 90% identical to SEQ ID NO: 485; (f) nucleotide 6 through nucleotide 36 of a sequence that is at least 90% identical to SEQ ID NO: 485; (g) nucleotide 7 through nucleotide 36 of a sequence that is at least 90% identical to SEQ ID NO: 485; (h) nucleotide 8 through nucleotide 36 of a sequence that is at least 90% identical to SEQ ID NO: 485; (i) nucleotide 9 through nucleotide 36 of a sequence that is at least 90% identical to SEQ ID NO: 485; (j) nucleotide 10 through nucleotide 36 of a sequence that is at least 90% identical to SEQ ID NO: 485; (k) nucleotide 11 through nucleotide 36 of a sequence that is at least 90% identical to SEQ ID NO: 485; (1) nucleotide 12 through nucleotide 36 of a sequence that is at least 90% identical to SEQ ID NO: 485; (m) nucleotide 13 through nucleotide 36 of a sequence that is at least 90% identical to SEQ ID NO: 485; (n) nucleotide 14 through nucleotide 36 of a sequence that is at least 90% identical to SEQ ID NO: 485; or (o) a sequence that is at least 90% identical to a sequence of SEQ ID NO: 486 or SEQ ID NO: 487 or a portion thereof.

[0296] In some examples, the direct repeat sequence comprises: (a) nucleotide 1 through nucleotide 36 of SEQ ID NO: 485; (b) nucleotide 2 through nucleotide 36 of SEQ ID NO: 485; (c) nucleotide 3 through nucleotide 36 of SEQ ID NO: 485; (d) nucleotide 4 through nucleotide 36 of SEQ ID NO: 485; (e) nucleotide 5 through nucleotide 36 of SEQ ID NO: 485; (f) nucleotide 6 through nucleotide 36 of SEQ ID NO: 485; (g) nucleotide 7 through nucleotide 36 of SEQ ID NO: 485; (h) nucleotide 8 through nucleotide 36 of SEQ ID NO: 485; (i) nucleotide 9 through nucleotide 36 of SEQ ID NO: 485; (j) nucleotide 10 through nucleotide 36 of SEQ ID NO: 485; (k) nucleotide 11 through nucleotide 36 of SEQ ID NO: 485; (1) nucleotide 12 through nucleotide 36 of SEQ ID NO: 485; (m) nucleotide 13 through nucleotide 36 of SEQ ID NO: 485; (n) nucleotide 14 through nucleotide 36 of SEQ ID NO: 485; or (o) SEQ ID NO: 486 or SEQ ID NO: 487 or a portion thereof.

[0297] In some examples, the direct repeat sequence comprises: (a) nucleotide 1 through nucleotide 36 of a sequence that is at least 90% identical to a sequence of SEQ ID NO: 488 or SEQ ID NO: 489; (b) nucleotide 2 through nucleotide 36 of a sequence that is at least 90% identical to a sequence of SEQ ID NO: 488 or SEQ ID NO: 489; (c) nucleotide 3 through nucleotide 36 of a sequence that is at least 90% identical to a sequence of SEQ ID NO: 488 or SEQ ID NO: 489; (d) nucleotide 4 through nucleotide 36 of a sequence that is at least 90% identical to a sequence of SEQ ID NO: 488 or SEQ ID NO: 489; (e) nucleotide 5 through nucleotide 36 of a sequence that is at least 90% identical to a sequence of SEQ ID NO: 488 or SEQ ID NO: 489; (f) nucleotide 6 through nucleotide 36 of a sequence that is at least 90% identical to a sequence of SEQ ID NO: 488 or SEQ ID NO: 489; (g) nucleotide 7 through nucleotide 36 of a sequence that is at least 90% identical to a sequence of SEQ ID NO: 488 or SEQ ID NO: 489; (h) nucleotide 8 through nucleotide 36 of a sequence that is at least 90% identical to a sequence of SEQ ID NO: 488 or SEQ ID NO: 489; (i) nucleotide 9 through nucleotide 36 of a sequence that is at least 90% identical to a sequence of SEQ ID NO: 488 or SEQ ID NO: 489; (j) nucleotide 10 through nucleotide 36 of a sequence that is at least 90% identical to a sequence of SEQ ID NO: 488 or SEQ ID NO: 489; (k) nucleotide 11 through nucleotide 36 of a sequence that is at least 90% identical to a sequence of SEQ ID NO: 488 or SEQ ID NO: 489; (1) nucleotide 12 through nucleotide 36 of a sequence that is at least 90% identical to a sequence of SEQ ID NO: 488 or SEQ ID NO: 489; (m) nucleotide 13 through nucleotide 36 of a sequence that is at least 90% identical to a sequence of SEQ ID NO: 488 or SEQ ID NO: 489; (n) nucleotide 14 through nucleotide 36 of a sequence that is at least 90% identical to a sequence of SEQ ID NO: 488 or SEQ ID NO: 489; (o) nucleotide 15 through nucleotide 36 of a sequence that is at least 90% identical to a sequence of SEQ ID NO: 488 or SEQ ID NO: 489; or (p) a sequence that is at least 90% identical to a sequence of SEQ ID NO: 490 or a portion thereof.

[0298] In some examples, the direct repeat sequence comprises: (a) nucleotide 1 through nucleotide 36 of SEQ ID NO: 488 or SEQ ID NO: 489; (b) nucleotide 2 through nucleotide 36 of SEQ ID NO: 488 or SEQ ID NO: 489; (c) nucleotide 3 through nucleotide 36 of SEQ ID NO: 488 or SEQ ID NO: 489; (d) nucleotide 4 through nucleotide 36 of SEQ ID NO: 488 or SEQ ID NO: 489; (e) nucleotide 5 through nucleotide 36 of SEQ ID NO: 488 or SEQ ID NO: 489; (f) nucleotide 6 through nucleotide 36 of SEQ ID NO: 488 or SEQ ID NO: 489; (g) nucleotide 7 through nucleotide 36 of SEQ ID NO: 488 or SEQ ID NO: 489; (h) nucleotide 8 through nucleotide 36 of SEQ ID NO: 488 or SEQ ID NO: 489; (i) nucleotide 9 through nucleotide 36 of SEQ ID NO: 488 or SEQ ID NO: 489; (j) nucleotide 10 through nucleotide 36 of SEQ ID NO: 488 or SEQ ID NO: 489; (k) nucleotide 11 through nucleotide 36 of SEQ ID NO: 488 or SEQ ID NO: 489; (1) nucleotide 12 through nucleotide 36 of SEQ ID NO: 488 or SEQ ID NO: 489; (m) nucleotide 13 through nucleotide 36 of SEQ ID NO: 488 or SEQ ID NO: 489; (n) nucleotide 14 through nucleotide 36 of SEQ ID NO: 488 or SEQ ID NO: 489; (o) nucleotide 15 through nucleotide 36 of SEQ ID NO: 488 or SEQ ID NO: 489; or (p) SEQ ID NO: 490 or a portion thereof.

[0299] In any of the RNA guide of Embodiment 6, the spacer sequence may be substantially complementary to the complement of a sequence of any one of SEQ ID NOs: 11-228 or 491-2496.

[0300] In any of the RNA guide of Embodiment 6, the target sequence may be adjacent to a protospacer adjacent motif (PAM) comprising the sequence 5′-NTTN-3′, wherein N is any nucleotide. In some examples, the PAM comprises the sequence 5′-ATTA-3′, 5′-ATTT-3′, 5′-ATTG-3′, 5′-ATTC-3′, 5′-TTTA-3′, 5′-TTTT-3′, 5′-TTTG-3′, 5′-TTTC-3′, 5′-GTTA-3′, 5′-GTTT-3′, 5′-GTTG-3′, 5′-GTTC-3′, 5′-CTTA-3′, 5′-CTTT-3′, 5′-CTTG-3′, or 5′-CTTC-3′.

[0301] In some examples, the target sequence is immediately adjacent to the PAM sequence. In other examples, the target sequence is within 1, 2, 3, 4, or 5 nucleotides of the PAM sequence.

[0302] In some examples, the RNA guide has a sequence that is at least 90% identical to a sequence of any one of SEQ ID NOs: 4505-4562. In specific examples, the RNA guide has the sequence of any one of SEQ ID NOs: 4505-4562.

[0303] Embodiment 7: A nucleic acid encoding an RNA guide as described herein.

[0304] Embodiment 8: A vector comprising such an RNA guide as described herein.

[0305] Embodiment 9: A cell comprising a composition, an RNA guide, a nucleic acid, or a vector as described herein. In some examples, the cell is a eukaryotic cell, an animal cell, a mammalian cell, a human cell, a primary cell, a cell line, a stem cell, a neuron, or a T cell.

[0306] Embodiment 10: A kit comprising a composition, an RNA guide, a nucleic acid, or a vector as described herein.

[0307] Embodiment 11: A method of editing an STMN2 sequence, the method comprising contacting an STMN2 sequence with a composition or an RNA guide as described herein. In some examples, the method is carried out in vitro. In other examples, the method is carried out ex vivo.

[0308] In some examples, the STMN2 sequence is in a cell.

[0309] In some examples, the composition or the RNA guide induces a deletion in the STMN2 sequence. In some examples, the deletion is adjacent to a 5′-NTTN-3′ sequence, wherein N is any nucleotide. In some specific examples, the deletion is downstream of the 5′-NTTN-3′ sequence. In some specific examples, the deletion is up to about 40 nucleotides in length. In some instances, the deletion is from about 4 nucleotides to 40 nucleotides, about 4 nucleotides to 25 nucleotides, about 10 nucleotides to 25 nucleotides, or about 10 nucleotides to 15 nucleotides in length.

[0310] In some examples, the deletion starts within about 5 nucleotides to about 15 nucleotides, about 5 nucleotides to about 10 nucleotides, or about 10 nucleotides to about 15 nucleotides of the 5′-NTTN-3′ sequence.

[0311] In some examples, the deletion starts within about 5 nucleotides to about 15 nucleotides, about 5 nucleotides to about 10 nucleotides, or about 10 nucleotides to about 15 nucleotides downstream of the 5′-NTTN-3′ sequence.

[0312] In some examples, the deletion ends within about 20 nucleotides to about 30 nucleotides, about 20 nucleotides to about 25 nucleotides, or about 25 nucleotides to about 30 nucleotides of the 5′-NTTN-3′ sequence.

[0313] In some examples, the deletion ends within about 20 nucleotides to about 30 nucleotides, about 20 nucleotides to about 25 nucleotides, about 25 nucleotides to about 30 nucleotides downstream of the 5′-NTTN-3′ sequence.

[0314] In some examples, the deletion starts within about 5 nucleotides to about 15 nucleotides downstream of the 5′-NTTN-3′ sequence and ends within about 20 nucleotides to about 30 nucleotides downstream of the 5′-NTTN-3′ sequence.

[0315] In some examples, the deletion starts within about 5 nucleotides to about 15 nucleotides downstream of the 5′-NTTN-3′ sequence and ends within about 20 nucleotides to about 25 nucleotides downstream of the 5′-NTTN-3′ sequence.

[0316] In some examples, the deletion starts within about 5 nucleotides to about 15 nucleotides downstream of the 5′-NTTN-3′ sequence and ends within about 25 nucleotides to about 30 nucleotides downstream of the 5′-NTTN-3′ sequence.

[0317] In some examples, the deletion starts within about 5 nucleotides to about 10 nucleotides downstream of the 5′-NTTN-3′ sequence and ends within about 20 nucleotides to about 30 nucleotides downstream of the 5′-NTTN-3′ sequence.

[0318] In some examples, the deletion starts within about 5 nucleotides to about 10 nucleotides downstream of the 5′-NTTN-3′ sequence and ends within about 20 nucleotides to about 25 nucleotides downstream of the 5′-NTTN-3′ sequence.

[0319] In some examples, the deletion starts within about 5 nucleotides to about 10 nucleotides downstream of the 5′-NTTN-3′ sequence and ends within about 25 nucleotides to about 30 nucleotides downstream of the 5′-NTTN-3′ sequence.

[0320] In some examples, the deletion starts within about 10 nucleotides to about 15 nucleotides downstream of the 5′-NTTN-3′ sequence and ends within about 20 nucleotides to about 30 nucleotides downstream of the 5′-NTTN-3′ sequence.

[0321] In some examples, the deletion starts within about 10 nucleotides to about 15 nucleotides downstream of the 5′-NTTN-3′ sequence and ends within about 20 nucleotides to about 25 nucleotides downstream of the 5′-NTTN-3′ sequence.

[0322] In some examples, the deletion starts within about 10 nucleotides to about 15 nucleotides downstream of the 5′-NTTN-3′ sequence and ends within about 25 nucleotides to about 30 nucleotides downstream of the 5′-NTTN-3′ sequence.

[0323] In some examples, the 5′-NTTN-3′ sequence is 5′-CTTT-3′, 5′-CTTC-3′, 5′-GTTT-3′, 5′-GTTC-3′, 5′-TTTC-3′, 5′-GTTA-3′, or 5′-GTTG-3′.

[0324] In some examples, the deletion overlaps with a mutation in the STMN2 sequence. In some instances, the deletion overlaps with an insertion in the STMN2 sequence. In some instances, the deletion removes a repeat expansion of the STMN2 sequence or a portion thereof. In some instances, the deletion disrupts one or both alleles of the STMN2 sequence.

[0325] In any of the composition, RNA guide, nucleic acid, vector, cell, kit, or method of Embodiments 1-11 described herein, the RNA guide may comprise the sequence of any one of SEQ ID NOs: 4505-4562.

[0326] Embodiment 12: A method of treating neurodegenerative diseases (e.g., amyotrophic lateral sclerosis (ALS) or frontotemporal dementia (FTD)) in a subject, the method comprising administering a composition, an RNA guide, or a cell described herein to the subject.

[0327] In any of the compositions, RNA guides, cells, kits, or methods described herein, the RNA guide and/or the polyribonucleotide encoding the Cas12i polypeptide are comprised within a lipid nanoparticle. In some examples, the RNA guide and the polyribonucleotide encoding the Cas12i polypeptide are comprised within the same lipid nanoparticle. In other examples, the RNA guide and the polyribonucleotide encoding the Cas12i polypeptide are comprised within separate lipid nanoparticles.

[0328] Embodiment 13: An RNA guide comprising (i) a spacer sequence that is complementary to a target site within an STMN2 gene (the target site being on the non-PAM strand and complementary to a target sequence), and (ii) a direct repeat sequence.

[0329] In some examples, the direct repeat sequence comprises: (a) nucleotide 1 through nucleotide 36 of a sequence that is at least 90% identical to a sequence of any one of SEQ ID NOs: 1-8; (b) nucleotide 2 through nucleotide 36 of a sequence that is at least 90% identical to a sequence of any one of SEQ ID NOs: 1-8; (c) nucleotide 3 through nucleotide 36 of a sequence that is at least 90% identical to a sequence of any one of SEQ ID NOs: 1-8; (d) nucleotide 4 through nucleotide 36 of a sequence that is at least 90% identical to a sequence of any one of SEQ ID NOs: 1-8; (e) nucleotide 5 through nucleotide 36 of a sequence that is at least 90% identical to a sequence of any one of SEQ ID NOs: 1-8; (f) nucleotide 6 through nucleotide 36 of a sequence that is at least 90% identical to a sequence of any one of SEQ ID NOs: 1-8; (g) nucleotide 7 through nucleotide 36 of a sequence that is at least 90% identical to a sequence of any one of SEQ ID NOs: 1-8; (h) nucleotide 8 through nucleotide 36 of a sequence that is at least 90% identical to a sequence of any one of SEQ ID NOs: 1-8; (i) nucleotide 9 through nucleotide 36 of a sequence that is at least 90% identical to a sequence of any one of SEQ ID NOs: 1-8; (j) nucleotide 10 through nucleotide 36 of a sequence that is at least 90% identical to a sequence of any one of SEQ ID NOs: 1-8; (k) nucleotide 11 through nucleotide 36 of a sequence that is at least 90% identical to a sequence of any one of SEQ ID NOs: 1-8; (1) nucleotide 12 through nucleotide 36 of a sequence that is at least 90% identical to a sequence of any one of SEQ ID NOs: 1-8; (m) nucleotide 13 through nucleotide 36 of a sequence that is at least 90% identical to a sequence of any one of SEQ ID NOs: 1-8; (n) nucleotide 14 through nucleotide 36 of a sequence that is at least 90% identical to a sequence of any one of SEQ ID NOs: 1-8; (o) nucleotide 1 through nucleotide 34 of a sequence that is at least 90% identical to a sequence of SEQ ID NO: 9; (p) nucleotide 2 through nucleotide 34 of a sequence that is at least 90% identical to a sequence of SEQ ID NO: 9; (q) nucleotide 3 through nucleotide 34 of a sequence that is at least 90% identical to a sequence of SEQ ID NO: 9; (r) nucleotide 4 through nucleotide 34 of a sequence that is at least 90% identical to a sequence of SEQ ID NO: 9; (s) nucleotide 5 through nucleotide 34 of a sequence that is at least 90% identical to a sequence of SEQ ID NO: 9; (t) nucleotide 6 through nucleotide 34 of a sequence that is at least 90% identical to a sequence of SEQ ID NO: 9; (u) nucleotide 7 through nucleotide 34 of a sequence that is at least 90% identical to a sequence of SEQ ID NO: 9; (v) nucleotide 8 through nucleotide 34 of a sequence that is at least 90% identical to a sequence of SEQ ID NO: 9; (w) nucleotide 9 through nucleotide 34 of a sequence that is at least 90% identical to a sequence of SEQ ID NO: 9; (x) nucleotide 10 through nucleotide 34 of a sequence that is at least 90% identical to a sequence of SEQ ID NO: 9; (y) nucleotide 11 through nucleotide 34 of a sequence that is at least 90% identical to a sequence of SEQ ID NO: 9; (z) nucleotide 12 through nucleotide 34 of a sequence that is at least 90% identical to a sequence of SEQ ID NO: 9; or (aa) a sequence that is at least 90% identical to a sequence of SEQ ID NO: 10 or a portion thereof.

[0330] In some examples, the direct repeat sequence comprises: (a) nucleotide 1 through nucleotide 36 of any one of SEQ ID NOs: 1-8; (b) nucleotide 2 through nucleotide 36 of any one of SEQ ID NOs: 1-8; (c) nucleotide 3 through nucleotide 36 of any one of SEQ ID NOs: 1-8; (d) nucleotide 4 through nucleotide 36 of any one of SEQ ID NOs: 1-8; (e) nucleotide 5 through nucleotide 36 of any one of SEQ ID NOs: 1-8; (f) nucleotide 6 through nucleotide 36 of any one of SEQ ID NOs: 1-8; (g) nucleotide 7 through nucleotide 36 of any one of SEQ ID NOs: 1-8; (h) nucleotide 8 through nucleotide 36 of any one of SEQ ID NOs: 1-8; (i) nucleotide 9 through nucleotide 36 of any one of SEQ ID NOs: 1-8; (j) nucleotide 10 through nucleotide 36 of any one of SEQ ID NOs: 1-8; (k) nucleotide 11 through nucleotide 36 of any one of SEQ ID NOs: 1-8; (1) nucleotide 12 through nucleotide 36 of any one of SEQ ID NOs: 1-8; (m) nucleotide 13 through nucleotide 36 of any one of SEQ ID NOs: 1-8; (n) nucleotide 14 through nucleotide 36 of any one of SEQ ID NOs: 1-8; (o) nucleotide 1 through nucleotide 34 of SEQ ID NO: 9; (p) nucleotide 2 through nucleotide 34 of SEQ ID NO: 9; (q) nucleotide 3 through nucleotide 34 of SEQ ID NO: 9; (r) nucleotide 4 through nucleotide 34 of SEQ ID NO: 9; (s) nucleotide 5 through nucleotide 34 of SEQ ID NO: 9; (t) nucleotide 6 through nucleotide 34 of SEQ ID NO: 9; (u) nucleotide 7 through nucleotide 34 of SEQ ID NO: 9; (v) nucleotide 8 through nucleotide 34 of SEQ ID NO: 9; (w) nucleotide 9 through nucleotide 34 of SEQ ID NO: 9; (x) nucleotide 10 through nucleotide 34 of SEQ ID NO: 9; (y) nucleotide 11 through nucleotide 34 of SEQ ID NO: 9; (z) nucleotide 12 through nucleotide 34 of SEQ ID NO: 9; or (aa) SEQ ID NO: 10 or a portion thereof.

[0331] In some examples, the direct repeat sequence comprises: (a) nucleotide 1 through nucleotide 36 of a sequence that is at least 90% identical to a sequence of any one of SEQ ID NOs: 462-479; (b) nucleotide 2 through nucleotide 36 of a sequence that is at least 90% identical to a sequence of any one of SEQ ID NOs: 462-479; (c) nucleotide 3 through nucleotide 36 of a sequence that is at least 90% identical to a sequence of any one of SEQ ID NOs: 462-479; (d) nucleotide 4 through nucleotide 36 of a sequence that is at least 90% identical to a sequence of any one of SEQ ID NOs: 462-479; (e) nucleotide 5 through nucleotide 36 of a sequence that is at least 90% identical to a sequence of any one of SEQ ID NOs: 462-479; (f) nucleotide 6 through nucleotide 36 of a sequence that is at least 90% identical to a sequence of any one of SEQ ID NOs: 462-479; (g) nucleotide 7 through nucleotide 36 of a sequence that is at least 90% identical to a sequence of any one of SEQ ID NOs: 462-479; (h) nucleotide 8 through nucleotide 36 of a sequence that is at least 90% identical to a sequence of any one of SEQ ID NOs: 462-479; (i) nucleotide 9 through nucleotide 36 of a sequence that is at least 90% identical to a sequence of any one of SEQ ID NOs: 462-479; (j) nucleotide 10 through nucleotide 36 of a sequence that is at least 90% identical to a sequence of any one of SEQ ID NOs: 462-479; (k) nucleotide 11 through nucleotide 36 of a sequence that is at least 90% identical to a sequence of any one of SEQ ID NOs: 462-479; (1) nucleotide 12 through nucleotide 36 of a sequence that is at least 90% identical to a sequence of any one of SEQ ID NOs: 462-479; (m) nucleotide 13 through nucleotide 36 of a sequence that is at least 90% identical to a sequence of any one of SEQ ID NOs: 462-479; (n) nucleotide 14 through nucleotide 36 of a sequence that is at least 90% identical to a sequence of any one of SEQ ID NOs: 462-479; or (o) a sequence that is at least 90% identical to a sequence of SEQ ID NO: 480 or a portion thereof.

[0332] In some examples, the direct repeat sequence comprises: (a) nucleotide 1 through nucleotide 36 of any one of SEQ ID NOs: 462-479; (b) nucleotide 2 through nucleotide 36 of any one of SEQ ID NOs: 462-479; (c) nucleotide 3 through nucleotide 36 of any one of SEQ ID NOs: 462-479; (d) nucleotide 4 through nucleotide 36 of any one of SEQ ID NOs: 462-479; (e) nucleotide 5 through nucleotide 36 of any one of SEQ ID NOs: 462-479; (f) nucleotide 6 through nucleotide 36 of any one of SEQ ID NOs: 462-479; (g) nucleotide 7 through nucleotide 36 of any one of SEQ ID NOs: 462-479; (h) nucleotide 8 through nucleotide 36 of any one of SEQ ID NOs: 462-479; (i) nucleotide 9 through nucleotide 36 of any one of SEQ ID NOs: 462-479; (j) nucleotide 10 through nucleotide 36 of any one of SEQ ID NOs: 462-479; (k) nucleotide 11 through nucleotide 36 of any one of SEQ ID NOs: 462-479; (1) nucleotide 12 through nucleotide 36 of any one of SEQ ID NOs: 462-479; (m) nucleotide 13 through nucleotide 36 of any one of SEQ ID NOs: 462-479; (n) nucleotide 14 through nucleotide 36 of any one of SEQ ID NOs: 462-479; or (o) SEQ ID NO: 480 or a portion thereof.

[0333] In some examples, the direct repeat sequence comprises: (a) nucleotide 1 through nucleotide 36 of a sequence that is at least 90% identical to SEQ ID NO: 485; (b) nucleotide 2 through nucleotide 36 of a sequence that is at least 90% identical to SEQ ID NO: 485; (c) nucleotide 3 through nucleotide 36 of a sequence that is at least 90% identical to SEQ ID NO: 485; (d) nucleotide 4 through nucleotide 36 of a sequence that is at least 90% identical to SEQ ID NO: 485; (e) nucleotide 5 through nucleotide 36 of a sequence that is at least 90% identical to SEQ ID NO: 485; (f) nucleotide 6 through nucleotide 36 of a sequence that is at least 90% identical to SEQ ID NO: 485; (g) nucleotide 7 through nucleotide 36 of a sequence that is at least 90% identical to SEQ ID NO: 485; (h) nucleotide 8 through nucleotide 36 of a sequence that is at least 90% identical to SEQ ID NO: 485; (i) nucleotide 9 through nucleotide 36 of a sequence that is at least 90% identical to SEQ ID NO: 485; (j) nucleotide 10 through nucleotide 36 of a sequence that is at least 90% identical to SEQ ID NO: 485; (k) nucleotide 11 through nucleotide 36 of a sequence that is at least 90% identical to SEQ ID NO: 485; (1) nucleotide 12 through nucleotide 36 of a sequence that is at least 90% identical to SEQ ID NO: 485; (m) nucleotide 13 through nucleotide 36 of a sequence that is at least 90% identical to SEQ ID NO: 485; (n) nucleotide 14 through nucleotide 36 of a sequence that is at least 90% identical to SEQ ID NO: 485; or (o) a sequence that is at least 90% identical to a sequence of SEQ ID NO: 486 or SEQ ID NO: 487 or a portion thereof.

[0334] In some examples, the direct repeat sequence comprises: (a) nucleotide 1 through nucleotide 36 of SEQ ID NO: 485; (b) nucleotide 2 through nucleotide 36 of SEQ ID NO: 485; (c) nucleotide 3 through nucleotide 36 of SEQ ID NO: 485; (d) nucleotide 4 through nucleotide 36 of SEQ ID NO: 485; (e) nucleotide 5 through nucleotide 36 of SEQ ID NO: 485; (f) nucleotide 6 through nucleotide 36 of SEQ ID NO: 485; (g) nucleotide 7 through nucleotide 36 of SEQ ID NO: 485; (h) nucleotide 8 through nucleotide 36 of SEQ ID NO: 485; (i) nucleotide 9 through nucleotide 36 of SEQ ID NO: 485; (j) nucleotide 10 through nucleotide 36 of SEQ ID NO: 485; (k) nucleotide 11 through nucleotide 36 of SEQ ID NO: 485; (1) nucleotide 12 through nucleotide 36 of SEQ ID NO: 485; (m) nucleotide 13 through nucleotide 36 of SEQ ID NO: 485; (n) nucleotide 14 through nucleotide 36 of SEQ ID NO: 485; or (o) SEQ ID NO: 486 or SEQ ID NO: 487 or a portion thereof.

[0335] In some examples, the direct repeat sequence comprises: (a) nucleotide 1 through nucleotide 36 of a sequence that is at least 90% identical to a sequence of SEQ ID NO: 488 or SEQ ID NO: 489; (b) nucleotide 2 through nucleotide 36 of a sequence that is at least 90% identical to a sequence of SEQ ID NO: 488 or SEQ ID NO: 489; (c) nucleotide 3 through nucleotide 36 of a sequence that is at least 90% identical to a sequence of SEQ ID NO: 488 or SEQ ID NO: 489; (d) nucleotide 4 through nucleotide 36 of a sequence that is at least 90% identical to a sequence of SEQ ID NO: 488 or SEQ ID NO: 489; (e) nucleotide 5 through nucleotide 36 of a sequence that is at least 90% identical to a sequence of SEQ ID NO: 488 or SEQ ID NO: 489; (f) nucleotide 6 through nucleotide 36 of a sequence that is at least 90% identical to a sequence of SEQ ID NO: 488 or SEQ ID NO: 489; (g) nucleotide 7 through nucleotide 36 of a sequence that is at least 90% identical to a sequence of SEQ ID NO: 488 or SEQ ID NO: 489; (h) nucleotide 8 through nucleotide 36 of a sequence that is at least 90% identical to a sequence of SEQ ID NO: 488 or SEQ ID NO: 489; (i) nucleotide 9 through nucleotide 36 of a sequence that is at least 90% identical to a sequence of SEQ ID NO: 488 or SEQ ID NO: 489; (j) nucleotide 10 through nucleotide 36 of a sequence that is at least 90% identical to a sequence of SEQ ID NO: 488 or SEQ ID NO: 489; (k) nucleotide 11 through nucleotide 36 of a sequence that is at least 90% identical to a sequence of SEQ ID NO: 488 or SEQ ID NO: 489; (1) nucleotide 12 through nucleotide 36 of a sequence that is at least 90% identical to a sequence of SEQ ID NO: 488 or SEQ ID NO: 489; (m) nucleotide 13 through nucleotide 36 of a sequence that is at least 90% identical to a sequence of SEQ ID NO: 488 or SEQ ID NO: 489; (n) nucleotide 14 through nucleotide 36 of a sequence that is at least 90% identical to a sequence of SEQ ID NO: 488 or SEQ ID NO: 489; (o) nucleotide 15 through nucleotide 36 of a sequence that is at least 90% identical to a sequence of SEQ ID NO: 488 or SEQ ID NO: 489; or (p) a sequence that is at least 90% identical to a sequence of SEQ ID NO: 490 or a portion thereof.

[0336] In some examples, the direct repeat sequence comprises: (a) nucleotide 1 through nucleotide 36 of SEQ ID NO: 488 or SEQ ID NO: 489; (b) nucleotide 2 through nucleotide 36 of SEQ ID NO: 488 or SEQ ID NO: 489; (c) nucleotide 3 through nucleotide 36 of SEQ ID NO: 488 or SEQ ID NO: 489; (d) nucleotide 4 through nucleotide 36 of SEQ ID NO: 488 or SEQ ID NO: 489; (e) nucleotide 5 through nucleotide 36 of SEQ ID NO: 488 or SEQ ID NO: 489; (f) nucleotide 6 through nucleotide 36 of SEQ ID NO: 488 or SEQ ID NO: 489; (g) nucleotide 7 through nucleotide 36 of SEQ ID NO: 488 or SEQ ID NO: 489; (h) nucleotide 8 through nucleotide 36 of SEQ ID NO: 488 or SEQ ID NO: 489; (i) nucleotide 9 through nucleotide 36 of SEQ ID NO: 488 or SEQ ID NO: 489; (j) nucleotide 10 through nucleotide 36 of SEQ ID NO: 488 or SEQ ID NO: 489; (k) nucleotide 11 through nucleotide 36 of SEQ ID NO: 488 or SEQ ID NO: 489; (1) nucleotide 12 through nucleotide 36 of SEQ ID NO: 488 or SEQ ID NO: 489; (m) nucleotide 13 through nucleotide 36 of SEQ ID NO: 488 or SEQ ID NO: 489; (n) nucleotide 14 through nucleotide 36 of SEQ ID NO: 488 or SEQ ID NO: 489; (o) nucleotide 15 through nucleotide 36 of SEQ ID NO: 488 or SEQ ID NO: 489; or (p) SEQ ID NO: 490 or a portion thereof.

[0337] In some examples, each of the first three nucleotides of the RNA guide comprises a 2′ methyl phosphorothioate modification.

[0338] In some examples, each of the last four nucleotides of the RNA guide comprises a 2′ methyl phosphorothioate modification.

[0339] In some examples, each of the first to last, second to last, and third to last nucleotides of the RNA guide comprises a 2′-O-methyl phosphorothioate modification, and wherein the last nucleotide of the RNA guide is unmodified.

[0340] Embodiment 14: A nucleic acid encoding an RNA guide as described herein.

[0341] Embodiment 15: A vector comprising the nucleic acid as described herein.

[0342] Embodiment 16: A vector system comprising one or more vectors encoding (i) the RNA guide of Embodiment 13 as described herein and (ii) a Cas12i polypeptide. In some examples, the vector system comprises a first vector encoding the RNA guide and a second vector encoding the Cas12i polypeptide.

[0343] Embodiment 17: A cell comprising the RNA guide, the nucleic acid, the vector, or the vector system of Embodiments 13-16 as described herein. In some examples, the cell is a eukaryotic cell, an animal cell, a mammalian cell, a human cell, a primary cell, a cell line, a stem cell, a neuron, or a T cell.

[0344] Embodiment 18: A kit comprising the RNA guide, the nucleic acid, the vector, or the vector system of Embodiments 13-16 as described herein.

[0345] Embodiment 19: A method of editing an STMN2 sequence, the method comprising contacting an STMN2 sequence with an RNA guide of Embodiment 13 as described herein. In some examples, the STMN2 sequence is in a cell.

[0346] In some examples, the RNA guide induces an indel (e.g., an insertion or deletion) in the STMN2 sequence.

[0347] Embodiment 20: A method of treating neurodegenerative diseases (e.g., amyotrophic lateral sclerosis (ALS) or frontotemporal dementia (FTD)), in a subject, the method comprising administering the RNA guide of Embodiment 13 as described herein to the subject.

### General Techniques

[0348] The practice of the present disclosure will employ, unless otherwise indicated, conventional techniques of molecular biology (including recombinant techniques), microbiology, cell biology, biochemistry, and immunology, which are within the skill of the art. Such techniques are explained fully in the literature, such as Molecular Cloning: A Laboratory Manual, second edition (Sambrook, et al., 1989) Cold Spring Harbor Press; Oligonucleotide Synthesis (M. J. Gait, ed. 1984); Methods in Molecular Biology, Humana Press; Cell Biology: A Laboratory Notebook (J. E. Cellis, ed., 1989) Academic Press; Animal Cell Culture (R. I. Freshney, ed. 1987); Introduction to Cell and Tissue Culture (J. P. Mather and P. E. Roberts, 1998) Plenum Press; Cell and Tissue Culture: Laboratory Procedures (A. Doyle, J. B. Griffiths, and D. G. Newell, eds. 1993-8) J. Wiley and Sons; Methods in Enzymology (Academic Press, Inc.); Handbook of Experimental Immunology (D. M. Weir and C. C. Blackwell, eds.): Gene Transfer Vectors for Mammalian Cells (J. M. Miller and M. P. Calos, eds., 1987); Current Protocols in Molecular Biology (F. M. Ausubel, et al. eds. 1987); PCR: The Polymerase Chain Reaction, (Mullis, et al., eds. 1994); Current Protocols in Immunology (J. E. Coligan et al., eds., 1991); Short Protocols in Molecular Biology (Wiley and Sons, 1999); Immunobiology (C. A. Janeway and P. Travers, 1997); Antibodies (P. Finch, 1997); Antibodies: a practice approach (D. Catty., ed., IRL Press, 1988-1989); Monoclonal antibodies: a practical approach (P. Shepherd and C. Dean, eds., Oxford University Press, 2000); Using antibodies: a laboratory manual (E. Harlow and D. Lane (Cold Spring Harbor Laboratory Press, 1999); The Antibodies (M. Zanetti and J. D. Capra, eds. Harwood Academic Publishers, 1995); DNA Cloning: A practical Approach, Volumes I and II (D. N. Glover ed. 1985); Nucleic Acid Hybridization (B. D. Hames & S. J. Higgins eds. (1985»; Transcription and Translation (B. D. Hames & S. J. Higgins, eds. (1984»; Animal Cell Culture (R. I. Freshney, ed. (1986»; Immobilized Cells and Enzymes (IRL Press, (1986»; and B. Perbal, A practical Guide To Molecular Cloning (1984); F. M. Ausubel et al. (eds.).

[0349] Without further elaboration, it is believed that one skilled in the art can, based on the above description, utilize the present disclosure to its fullest extent. The following specific embodiments are, therefore, to be construed as merely illustrative, and not limitative of the remainder of the present disclosure in any way whatsoever. All publications cited herein are incorporated by reference for the purposes or subject matter referenced herein.

### EXAMPLES

[0350] The following examples are provided to further illustrate some embodiments of the present disclosure but are not intended to limit the scope of the present disclosure; it will be understood by their exemplary nature that other procedures, methodologies, or techniques known to those skilled in the art may alternatively be used.

### Example 1—Targeting of STMN2 Intron 1 by Variant Cas12i2

[0351] This Example describes indel assessment on multiple targets at the STMN2 gene in cells after transfection with plasmids coding for variant Cas12i2 (SEQ ID NO: 450) and RNA guides.

[0352] The variant Cas12i2 polypeptide was cloned into a plasmid comprising a CMV promoter. Fragments coding for RNA guides targeting the STMN2 intron 1 gene were cloned into a pUC19 backbone (New England Biolabs). The plasmids were then maxi-prepped and diluted. The crRNA, target, and PAM sequences are listed in Table 6.

TABLE 6
Mammalian targets and corresponding crRNAs.

| Target | SEQ | | SEQ | | PAM |
|---|---|---|---|---|---|
| identifier | ID NO | crRNA sequence | ID NO | Target sequence | sequence |
| 1 | 4505 | AGAAAUCCGUCUUUCAUU | 4563 | TGCCCCATCACTCTCTCT | TTC |
| or I1T1 | | GACGGUGCCCCAUCACUCU | | TA | |
| | | CUCUUA | | | |
| 2 | 4506 | AGAAAUCCGUCUUUCAUU | 4564 | ATTGGATTTTTAAAATTA | TTA |
| or I1T2 | | GACGGAUUGGAUUUUUAA | | TA | |
| | | AAUUAUA | | | |
| 3 | 4507 | AGAAAUCCGUCUUUCAUU | 4565 | GATTTTTAAAATTATATT | TTG |
| or I1T3 | | GACGGGAUUUUUAAAAUU | | CA | |
| | | AUAUUCA | | | |
| 4 | 4508 | AGAAAUCCGUCUUUCAUU | 4566 | TTAAAATTATATTCATAT | TTT |
| or I1T4 | | GACGGUUAAAAUUAUAUU | | TG | |
| | | CAUAUUG | | | |
| 5 | 4509 | AGAAAUCCGUCUUUCAUU | 4567 | TAAAATTATATTCATATT | TTT |
| or I1T5 | | GACGGUAAAAUUAUAUUC | | GC | |
| | | AUAUUGC | | | |
| 6 | 4510 | AGAAAUCCGUCUUUCAUU | 4568 | AAAATTATATTCATATTG | TTT |
| or I1T6 | | GACGGAAAAUUAUAUUCA | | CA | |
| | | UAUUGCA | | | |
| 7 | 4511 | AGAAAUCCGUCUUUCAUU | 4569 | AAATTATATTCATATTGC | TTA |
| or I1T7 | | GACGGAAAUUAUAUUCAU | | AG | |
| | | AUUGCAG | | | |
| 8 | 4512 | AGAAAUCCGUCUUUCAUU | 4570 | TATTCATATTGCAGGACT | TTA |
| or I1T8 | | GACGGUAUUCAUAUUGCA | | CG | |
| | | GGACUCG | | | |
| 9 | 4513 | AGAAAUCCGUCUUUCAUU | 4571 | ATATTGCAGGACTCGGC | TTC |
| or I1T9 | | GACGGAUAUUGCAGGACU | | AGA | |
| | | CGGCAGA | | | |
| 10 | 4514 | AGAAAUCCGUCUUUCAUU | 4572 | CAGGACTCGGCAGAAGA | TTG |
| or I1T10 | | GACGGCAGGACUCGGCAG | | CCT | |
| | | AAGACCU | | | |
| 11 | 4515 | AGAAAUCCGUCUUUCAUU | 4573 | GAGAGAAAGGTAGAAA | TTC |
| or I1T11 | | GACGGGAGAGAAAGGUAG | | ATAA | |
| | | AAAAUAA | | | |
| 12 | 4516 | AGAAAUCCGUCUUUCAUU | 4574 | GGCTCTCTGTGTGAGCA | TTT |
| or I1T12 | | GACGGGGCUCUCUGUGUG | | TGT | |
| | | AGCAUGU | | | |
| 13 | 4517 | AGAAAUCCGUCUUUCAUU | 4575 | GCTCTCTGTGTGAGCAT | TTG |
| or I1T13 | | GACGGGCUCUCUGUGUGA | | GTG | |
| | | GCAUGUG | | | |
| 14 | 4318 | AGAAAUCCGUCUUUCAUU | 4576 | TGGCACAGTTGACAAGG | TTG |
| or I1T14 | | GACGGUGGCACAGUUGAC | | ATG | |
| | | AAGGAUG | | | |
| 15 | 4519 | AGAAAUCCGUCUUUCAUU | 4577 | ACAAGGATGATAAATCA | TTG |
| or I1T15 | | GACGGACAAGGAUGAUAA | | ATA | |
| | | AUCAAUA | | | |
| 16 | 4520 | AGAAAUCCGUCUUUCAUU | 4578 | CTATCATTTATGAATAGC | TTA |
| or I1T16 | | GACGGCUAUCAUUUAUGA | | AA | |
| | | AUAGCAA | | | |
| 17 | 4521 | AGAAAUCCGUCUUUCAUU | 4579 | ATGAATAGCAATACTGA | TTT |
| or I1T17 | | GACGGAUGAAUAGCAAUA | | AGA | |
| | | CUGAAGA | | | |
| 18 | 4522 | AGAAAUCCGUCUUUCAUU | 4580 | TGAATAGCAATACTGAA | TTA |
| or I1T18 | | GACGGUGAAUAGCAAUAC | | GAA | |
| | | UGAAGAA | | | |
| 19 | 4523 | AGAAAUCCGUCUUUCAUU | 4581 | AAACAAAAGATTGCTGT | TTA |
| or I1T19 | | GACGGAAACAAAAGAUUG | | CTC | |
| | | CUGUCUC | | | |
| 20 | 4524 | AGAAAUCCGUCUUUCAUU | 4582 | CTGTCTCAATATATCTTA | TTG |
| or I1T20 | | GACGGCUGUCUCAAUAUA | | TA | |
| | | UCUUAUA | | | |
| 21 | 4525 | AGAAAUCCGUCUUUCAUU | 4583 | TATTTATTATTTACCAAA | TTA |
| or I1T21 | | GACGGUAUUUAUUAUUUA | | TT | |
| | | CCAAAUU | | | |
| 22 | 4526 | AGAAAUCCGUCUUUCAUU | 4584 | AGGAAGAAATACTCTTA | TTC |
| or I1T22 | | GACGGAGGAAGAAAUACU | | GAA | |
| | | CUUAGAA | | | |
| 23 | 4527 | AGAAAUCCGUCUUUCAUU | 4585 | GAATAATTTGGTAAATA | TTA |
| or I1T23 | | GACGGGAAUAAUUUGGUA | | ATA | |
| | | AAUAAUA | | | |
| 24 | 4528 | AGAAAUCCGUCUUUCAUU | 4586 | GGTAAATAATAAATATA | TTT |
| or I1T24 | | GACGGGGUAAAUAAUAAA | | AGA | |
| | | UAUAAGA | | | |
| 25 | 4529 | AGAAAUCCGUCUUUCAUU | 4587 | GTAAATAATAAATATAA | TTG |
| or I1T25 | | GACGGGUAAAUAAUAAAU | | GAT | |
| | | AUAAGAU | | | |
| 26 | 4530 | AGAAAUCCGUCUUUCAUU | 4588 | AGACAGCAATCTTTTGTT | TTG |
| or I1T26 | | GACGGAGACAGCAAUCUU | | TT | |
| | | UUGUUUU | | | |
| 27 | 4531 | AGAAAUCCGUCUUUCAUU | 4589 | TGTTTTAATTTCTTCAGT | TTT |
| or I1T27 | | GACGGUGUUUUAAUUUCU | | AT | |
| | | UCAGUAU | | | |
| 28 | 4532 | AGAAAUCCGUCUUUCAUU | 4590 | GTTTTAATTTCTTCAGTA | TTT |
| or I1T28 | | GACGGGUUUUAAUUUCUU | | TT | |
| | | CAGUAUU | | | |
| 29 | 4533 | AGAAAUCCGUCUUUCAUU | 4591 | TTTTAATTTCTTCAGTAT | TTG |
| or I1T29 | | GACGGUUUUAAUUUCUUC | | TG | |
| | | AGUAUUG | | | |
| 30 | 4534 | AGAAAUCCGUCUUUCAUU | 4592 | TAATTTCTTCAGTATTGC | TTT |
| or I1T30 | | GACGGUAAUUUCUUCAGU | | TA | |
| | | AUUGCUA | | | |
| 31 | 4535 | AGAAAUCCGUCUUUCAUU | 4593 | AATTTCTTCAGTATTGCT | TTT |
| or I1T31 | | GACGGAAUUUCUUCAGUA | | AT | |
| | | UUGCUAU | | | |
| 32 | 4536 | AGAAAUCCGUCUUUCAUU | 4594 | ATTTCTTCAGTATTGCTA | TTA |
| or I1T32 | | GACGGAUUUCUUCAGUAU | | TT | |
| | | UGCUAUU | | | |
| 33 | 4537 | AGAAAUCCGUCUUUCAUU | 4595 | CTTCAGTATTGCTATTCA | TTT |
| or I1T33 | | GACGGCUUCAGUAUUGCU | | TA | |
| | | AUUCAUA | | | |
| 34 | 4538 | AGAAAUCCGUCUUUCAUU | 4596 | TTCAGTATTGCTATTCAT | TTC |
| or I1T34 | | GACGGUUCAGUAUUGCUA | | AA | |
| | | UUCAUAA | | | |
| 35 | 4539 | AGAAAUCCGUCUUUCAUU | 4597 | AGTATTGCTATTCATAA | TTC |
| or I1T35 | | GACGGAGUAUUGCUAUUC | | ATG | |
| | | AUAAAUG | | | |
| 36 | 4540 | AGAAAUCCGUCUUUCAUU | 4598 | CTATTCATAAATGATAG | TTG |
| or I1T36 | | GACGGCUAUUCAUAAAUG | | TAA | |
| | | AUAGUAA | | | |
| 37 | 4541 | AGAAAUCCGUCUUUCAUU | 4599 | ATAAATGATAGTAAGCT | TTC |
| or I1T37 | | GACGGAUAAAUGAUAGUA | | TGC | |
| | | AGCUUGC | | | |
| 38 | 4542 | AGAAAUCCGUCUUUCAUU | 4600 | CATTATTGATTTATCATC | TTG |
| or I1T38 | | GACGGCAUUAUUGAUUUA | | CT | |
| | | UCAUCCU | | | |
| 39 | 4543 | AGAAAUCCGUCUUUCAUU | 4601 | TTGATTTATCATCCTTGT | TTA |
| or I1T39 | | GACGGUUGAUUUAUCAUC | | CA | |
| | | CUUGUCA | | | |
| 40 | 4544 | AGAAAUCCGUCUUUCAUU | 4602 | ATTTATCATCCTTGTCAA | TTG |
| or I1T40 | | GACGGAUUUAUCAUCCUU | | CT | |
| | | GUCAACU | | | |
| 41 | 4545 | AGAAAUCCGUCUUUCAUU | 4603 | ATCATCCTTGTCAACTGT | TTT |
| or I1T41 | | GACGGAUCAUCCUUGUCA | | GC | |
| | | ACUGUGC | | | |
| 42 | 4546 | AGAAAUCCGUCUUUCAUU | 4604 | TCATCCTTGTCAACTGTG | TTA |
| or I1T42 | | GACGGUCAUCCUUGUCAA | | CC | |
| | | CUGUGCC | | | |
| 43 | 4547 | AGAAAUCCGUCUUUCAUU | 4605 | TCAACTGTGCCACAAGC | TTG |
| or I1T43 | | GACGGUCAACUGUGCCAC | | CGC | |
| | | AAGCCGC | | | |
| 44 | 4548 | AGAAAUCCGUCUUUCAUU | 4606 | ACATTCATTTCTTCTTAG | TTC |
| or I1T44 | | GACGGACAUUCAUUUCUU | | GC | |
| | | CUUAGGC | | | |
| 45 | 4549 | AGAAAUCCGUCUUUCAUU | 4607 | ATTTCTTCTTAGGCAGGC | TTC |
| or I1T45 | | GACGGAUUUCUUCUUAGG | | TG | |
| | | CAGGCUG | | | |
| 46 | 4550 | AGAAAUCCGUCUUUCAUU | 4608 | CTTCTTAGGCAGGCTGTC | TTT |
| or I1T46 | | GACGGCUUCUUAGGCAGG | | TG | |
| | | CUGUCUG | | | |
| 47 | 4551 | AGAAAUCCGUCUUUCAUU | 4609 | TTCTTAGGCAGGCTGTCT | TTC |
| or I1T47 | | GACGGUUCUUAGGCAGGC | | GT | |
| | | UGUCUGU | | | |
| 48 | 4552 | AGAAAUCCGUCUUUCAUU | 4610 | TTAGGCAGGCTGTCTGT | TTC |
| or I1T48 | | GACGGUUAGGCAGGCUGU | | CTC | |
| | | CUGUCUC | | | |
| 49 | 4553 | AGAAAUCCGUCUUUCAUU | 4611 | GGCAGGCTGTCTGTCTCT | TTA |
| or I1T49 | | GACGGGGCAGGCUGUCUG | | CT | |
| | | UCUCUCU | | | |
| 50 | 4554 | AGAAAUCCGUCUUUCAUU | 4612 | TTATTTTCTACCTTTCTC | TTC |
| or I1T50 | | GACGGUUAUUUUCUACCU | | TC | |
| | | UUCUCUC | | | |
| 51 | 4555 | AGAAAUCCGUCUUUCAUU | 4613 | TTTTCTACCTTTCTCTCG | TTA |
| or I1T51 | | GACGGUUUUCUACCUUUC | | AA | |
| | | UCUCGAA | | | |
| 52 | 4556 | AGAAAUCCGUCUUUCAUU | 4614 | TCTACCTTTCTCTCGAAG | TTT |
| or I1T52 | | GACGGUCUACCUUUCUCUC | | GT | |
| | | GAAGGU | | | |
| 53 | 4557 | AGAAAUCCGUCUUUCAUU | 4615 | CTACCTTTCTCTCGAAGG | TTT |
| or I1T53 | | GACGGCUACCUUUCUCUCG | | TC | |
| | | AAGGUC | | | |
| 54 | 4558 | AGAAAUCCGUCUUUCAUU | 4616 | TACCTTTCTCTCGAAGGT | TTC |
| or I1T54 | | GACGGUACCUUUCUCUCG | | CT | |
| | | AAGGUCU | | | |
| 55 | 4559 | AGAAAUCCGUCUUUCAUU | 4617 | CTCTCGAAGGTCTTCTGC | TTT |
| or I1T55 | | GACGGCUCUCGAAGGUCU | | CG | |
| | | UCUGCCG | | | |
| 56 | 4560 | AGAAAUCCGUCUUUCAUU | 4618 | TCTCGAAGGTCTTCTGCC | TTC |
| or I1T56 | | GACGGUCUCGAAGGUCUU | | GA | |
| | | CUGCCGA | | | |
| 57 | 4561 | AGAAAUCCGUCUUUCAUU | 4619 | TGCCGAGTCCTGCAATA | TTC |
| or I1T57 | | GACGGUGCCGAGUCCUGC | | TGA | |
| | | AAUAUGA | | | |
| 58 | 4562 | AGAAAUCCGUCUUUCAUU | 4620 | TAAAAATCCAATTAAGA | TTT |
| or I1T58 | | GACGGUAAAAAUCCAAUU | | GAG | |
| | | AAGAGAG | | | |

[0353] Approximately 16 hours prior to transfection, 25,000 HEK293T cells in DMEM/10% FBS+Pen/Strep (D10 media) were plated into each well of a 96-well plate. On the day of transfection, the cells were 70-90% confluent. For each well to be transfected, a mixture of LIPOFECTAMINE® 2000 transfection reagent (ThermoFisher) and Opti-MEM® reduced serum medium (ThermoFisher) was prepared and incubated at room temperature for 5 minutes (Solution 1). After incubation, the LIPOFECTAMINE® 2000:Opti-MEM® (transfection reagent (ThermoFisher):reduced serum medium (ThermoFisher)) mixture was added to a separate mixture containing nuclease plasmid, RNA guide plasmid, and Opti-MEM® reduced serum medium (ThermoFisher) (Solution 2). In the case of negative controls, the RNA guide plasmid was not included in Solution 2. Solution 1 and 2 were pipette mixed 8 times, then incubated at room temperature for 25 minutes. Following incubation, the Solution 1 and 2 mixture was added dropwise to each well of a 96-well plate containing the cells. 72 hours post transfection, cells were trypsinized by adding TRYPLE™ (recombinant cell-dissociation enzymes; ThermoFisher) to the center of each well and incubating at 37° C. for approximately 5 minutes. D10 media was then added to each well and mixed to resuspend cells. The resuspended cells were centrifuged at 500×g for 10 minutes to obtain a pellet, and the supernatant was discarded. QUICKEXTRACT™ (DNA extraction solution; Lucigen) extraction reagent was added to each well to lyse pelleted cells. Cells were incubated at 65° C. for 15 minutes, 68° C. for 15 minutes, and 98° C. for 10 minutes.

[0354] Samples for NGS were prepared by two rounds of PCR. The first round (PCR1) was used to amplify specific genomic regions depending on the target. Round 2 PCR (PCR2) was performed to add Illumina adapters and indices. Reactions were then pooled and purified by column purification. Sequencing runs were done with a 300 Cycle NEXTSEQ™ (Illumina) 500/550 High Output v2.5 Kit.

[0355] As shown in FIG. 1, RNA guides 1, 3, 4, 5, 6, 8, 9, 10, 11, 12, 13, 14, 16, 17, 18, 19, 20, 21, 22, 23, 24, 25, 26, 27, 28, 29, 30, 31, 33, 34, 35, 36, 37, 38, 39, 40, 41, 42, 43, 44, 45, 46, 47, 48, 49, 50, 51, 52, 53, 54, 55, 56, 57, and 58 all resulted in measurable indel activity, defined as >1% and >0.2% above the background rate for the no-RNA guide control.

[0356] RNA guides 4, 8, 55, and 57 resulted in >15% disruption of the cryptic splice site in intron 1 (FIG. 2A), where disruption is defined as an insertion or deletion at one or more bases of the cryptic splice site. 97% of the indels generated by RNA guide 4 resulted in disruption of the cryptic splice site in intron 1, where disruption is defined as an insertion or deletion at one or more bases of the cryptic splice site.

[0357] RNA guides 12, 46, 47, 48, and 49 resulted in >15% disruption of at least one of 3 TDP-43 binding motifs in intron 1 (FIG. 2B), where disruption is defined as an insertion or deletion at one or more bases of a TDP-43 binding motif. 97% of the indels generated by RNA guide 12 resulted in disruption of at least one of 3 TDP-43 binding motifs in intron 1, where disruption is defined as an insertion or deletion at one or more bases of a TDP-43 binding motif.

[0358] RNA guides 17 and 18 resulted in >15% disruption of the premature polyadenylation signal in intron 1 (FIG. 2C), where disruption is defined as an insertion or deletion at one or more bases of the polyadenylation signal. 88% of the indels generated by RNA guide 17 resulted in disruption of the premature polyadenylation signal at intron 1, where disruption is defined as an insertion or deletion at one or more bases of the premature polyadenylation site. 93% of the indels generated by RNA guide 18 resulted in disruption of the premature polyadenylation signal at intron 1, where disruption is defined as an insertion or deletion at one or more bases of the premature polyadenylation site.

[0359] FIG. 3 depicts the positions where each of the RNA guides binds intron 1 of STMN2 relative to the positions of the cryptic splice site, the TDP-43 binding motifs, and the premature polyadenylation signal. The darker grey reflects RNA guides demonstrating indels in greater than 30% of NGS reads, and the lighter grey reflects RNA guides demonstrating indels in less than 30% of NGS read. This Example thus shows that Cas12i2 guides edited intron 1 of STMN2 and were able to disrupt the cryptic splice site, TDP-43 binding motifs, and premature polyadenylation signals.

### Example 2—Targeting of STMN2 Intron 1 by Variant Cas12i2 in SH-SY % Y Cells

[0360] This Example describes indel assessment on multiple targets at the STMN2 gene in a neuroblastoma cell line after transfection with plasmids coding for variant Cas12i2 (SEQ ID NO: 450) and RNA guides targeting the cryptic splice site of intron 1.

[0361] The variant Cas12i2 polypeptide and RNA guides 4, 5, 8, 9, 55, 56, 57, and 58 of Table 6 were cloned, purified, and diluted as described in Example 1. Approximately 16 hours prior to transfection, 25,000 SH-SY5Y cells in EMEM:F12/10% FBS+Pen/Strep (EF12-10 media) were plated into each well of a 96-well plate. On the day of transfection, the cells were 70-90% confluent. For each well to be transfected, a mixture of LIPOFECTAMINE® 2000 transfection reagent (ThermoFisher) and Opti-MEM® reduced serum medium (ThermoFisher) was prepared and incubated at room temperature for 5 minutes (Solution 1). After incubation, the LIPOFECTAMINE® 2000:Opti-MEM® (transfection reagent (ThermoFisher):reduced serum medium (ThermoFisher)) mixture was added to a separate mixture containing nuclease plasmid, RNA guide plasmid, and Opti-MEM® reduced serum medium (ThermoFisher) (Solution 2). In the case of negative controls, the RNA guide plasmid was not included in Solution 2. Solution 1 and 2 were pipette mixed 8 times, then incubated at room temperature for 25 minutes. Following incubation, the Solution 1 and 2 mixture was added dropwise to each well of a 96-well plate containing the cells. 72 hours post transfection, cells were trypsinized by adding TRYPLE™ (recombinant cell-dissociation enzymes; ThermoFisher) to the center of each well and incubating at 37° C. for approximately 5 minutes. EF12-10 media was then added to each well and mixed to resuspend cells. The resuspended cells were centrifuged at 500×g for 10 minutes to obtain a pellet, and the supernatant was discarded. QUICKEXTRACT™ (DNA extraction solution; Lucigen) extraction reagent was added to each well to lyse pelleted cells. Cells were incubated at 65° C. for 15 minutes, 68° C. for 15 minutes, and 98° C. for 10 minutes.

[0362] Samples for NGS were prepared by two rounds of PCR. The first round (PCR1) was used to amplify specific genomic regions depending on the target. Round 2 PCR (PCR2) was performed to add Illumina adapters and indices. Reactions were then pooled and purified by column purification. Sequencing runs were done with a 300 Cycle NEXTSEQ™ (Illumina) 500/550 High Output v2.5 Kit.

[0363] FIG. 4 shows indel activity of the tested RNA guides in SH-SY5Y cells. Guide 4 showed 0.56% splice site motif disruption and 2.0% overall editing; greater than 25% of total edits disrupted the splice site. Guide 5 showed 0.12% splice site motif disruption and 1.5% overall editing; less than 10% of total edits disrupted the splice site. Guide 8 showed 0.62% splice site motif disruption and 2.4% overall editing; greater than 25% of total edits disrupted the splice site. Guide 9 showed 0.34% splice site motif disruption and 3.8% overall editing; less than 10% of total edits disrupted the splice site. Guide 55 showed 2.2% splice site motif disruption and 4.9% overall editing; greater than 40% of total edits disrupted the splice site. Guide 56 showed 2.3% splice site motif disruption and 4.9% overall editing; greater than 45% of total edits disrupted the splice site. Guide 57 showed 0% splice site motif disruption and 1.6% overall editing. Guide 58 showed 0.49% splice site motif disruption and 3.3% overall editing; greater than 10% of total edits disrupted the splice site.

[0364] FIG. 5A is a plot comparing indel activity (% indels) demonstrated in HEK293T cells and SH-SY5Y cells from Example 1 and Example 2, respectively. FIG. 5B is a plot comparing splice site motif disruption demonstrated in HEK293T cells and SH-SY5Y cells from Example 1 and Example 2, respectively. As shown in FIG. 5A, Guide 55 and Guide 9 demonstrated the highest % indels across the two cell types. Guide 56 demonstrated the highest % indels in SH-SY5Y cells but low % indels in HEK293T cells. Guide 55 resulted in the highest splice site motif disruption in the two cell types as well (FIG. 5B).

[0365] This Example thus shows that the cryptic splice site of intron 1 of STMN2 is capable of being targeted by Cas12i2 and multiple RNA guides in multiple cell types.

### Other Embodiments

[0366] All of the features disclosed in this specification may be combined in any combination. Each feature disclosed in this specification may be replaced by an alternative feature serving the same, equivalent, or similar purpose. Thus, unless expressly stated otherwise, each feature disclosed is only an example of a generic series of equivalent or similar features.

[0367] From the above description, one skilled in the art can easily ascertain the essential characteristics of the present disclosure, and without departing from the spirit and scope thereof, can make various changes and modifications of the present disclosure to adapt it to various usages and conditions. Thus, other embodiments are also within the claims.

### EQUIVALENTS

[0368] While several inventive embodiments have been described and illustrated herein, those of ordinary skill in the art will readily envision a variety of other means and/or structures for performing the function and/or obtaining the results and/or one or more of the advantages described herein, and each of such variations and/or modifications is deemed to be within the scope of the inventive embodiments described herein. More generally, those skilled in the art will readily appreciate that all parameters, dimensions, materials, and configurations described herein are meant to be exemplary and that the actual parameters, dimensions, materials, and/or configurations will depend upon the specific application or applications for which the inventive teachings is/are used. Those skilled in the art will recognize, or be able to ascertain using no more than routine experimentation, many equivalents to the specific inventive embodiments described herein. It is, therefore, to be understood that the foregoing embodiments are presented by way of example only and that, within the scope of the appended claims and equivalents thereto, inventive embodiments may be practiced otherwise than as specifically described and claimed. Inventive embodiments of the present disclosure are directed to each individual feature, system, article, material, kit, and/or method described herein. In addition, any combination of two or more such features, systems, articles, materials, kits, and/or methods, if such features, systems, articles, materials, kits, and/or methods are not mutually inconsistent, is included within the inventive scope of the present disclosure.

[0369] All definitions, as defined and used herein, should be understood to control over dictionary definitions, definitions in documents incorporated by reference, and/or ordinary meanings of the defined terms.

[0370] All references, patents and patent applications disclosed herein are incorporated by reference with respect to the subject matter for which each is cited, which in some cases may encompass the entirety of the document.

[0371] The indefinite articles “a” and “an,” as used herein in the specification and in the claims, unless clearly indicated to the contrary, should be understood to mean “at least one.”

[0372] The phrase “and/or,” as used herein in the specification and in the claims, should be understood to mean “either or both” of the elements so conjoined, i.e., elements that are conjunctively present in some cases and disjunctively present in other cases. Multiple elements listed with “and/or” should be construed in the same fashion, i.e., “one or more” of the elements so conjoined. Other elements may optionally be present other than the elements specifically identified by the “and/or” clause, whether related or unrelated to those elements specifically identified. Thus, as a non-limiting example, a reference to “A and/or B”, when used in conjunction with open-ended language such as “comprising” can refer, in one embodiment, to A only (optionally including elements other than B); in another embodiment, to B only (optionally including elements other than A); in yet another embodiment, to both A and B (optionally including other elements); etc.

[0373] As used herein in the specification and in the claims, “or” should be understood to have the same meaning as “and/or” as defined above. For example, when separating items in a list, “or” or “and/or” shall be interpreted as being inclusive, i.e., the inclusion of at least one, but also including more than one, of a number or list of elements, and, optionally, additional unlisted items. Only terms clearly indicated to the contrary, such as “only one of” or “exactly one of,” or, when used in the claims, “consisting of,” will refer to the inclusion of exactly one element of a number or list of elements. In general, the term “or” as used herein shall only be interpreted as indicating exclusive alternatives (i.e. “one or the other but not both”) when preceded by terms of exclusivity, such as “either,” “one of,” “only one of,” or “exactly one of.” “Consisting essentially of,” when used in the claims, shall have its ordinary meaning as used in the field of patent law.

[0374] As used herein in the specification and in the claims, the phrase “at least one,” in reference to a list of one or more elements, should be understood to mean at least one element selected from any one or more of the elements in the list of elements, but not necessarily including at least one of each and every element specifically listed within the list of elements and not excluding any combinations of elements in the list of elements. This definition also allows that elements may optionally be present other than the elements specifically identified within the list of elements to which the phrase “at least one” refers, whether related or unrelated to those elements specifically identified. Thus, as a non-limiting example, “at least one of A and B” (or, equivalently, “at least one of A or B,” or, equivalently “at least one of A and/or B”) can refer, in one embodiment, to at least one, optionally including more than one, A, with no B present (and optionally including elements other than B); in another embodiment, to at least one, optionally including more than one, B, with no A present (and optionally including elements other than A); in yet another embodiment, to at least one, optionally including more than one, A, and at least one, optionally including more than one, B (and optionally including other elements); etc.

[0375] It should also be understood that, unless clearly indicated to the contrary, in any methods claimed herein that include more than one step or act, the order of the steps or acts of the method is not necessarily limited to the order in which the steps or acts of the method are recited.

1. A gene editing system for genetic editing of a stathmin 2 (STMN2) gene, comprising
(i) a Cas12i2 polypeptide or a first nucleic acid encoding the Cas12i2 polypeptide, wherein the Cas12i2 polypeptide comprises an amino acid sequence at least 95% identical to SEQ ID NO: 448 and comprises one or more mutations relative to SEQ ID NO: 448; and
(ii) an RNA guide or a second nucleic acid encoding the RNA guide, wherein the RNA guide comprises a spacer sequence specific to a target sequence within an STMN2 gene, the target sequence being adjacent to a protospacer adjacent motif (PAM) comprising the motif of 5′-TTN-3′, which is located 5′ to the target sequence.

2. The gene editing system of claim 1, wherein the one or more mutations in the Cas12i2 polypeptide are at positions D581, G624, F626, P868, 1926, V1030, E1035, and/or S1046 of SEQ ID NO: 448.

3. The gene editing system of claim 2, wherein the one or more mutations are amino acid substitutions, which is D581R, G624R, F626R, P868T, I926R, V1030G, E1035R, 51046G, or a combination thereof.

4. The gene editing system of claim 3, wherein the Cas12i2 polypeptide comprises:
(i) mutations at positions D581, D911, 1926, and V1030, which optionally are amino acid substitutions of D581R, D911R, I926R, and V1030G;
(ii) mutations at positions D581, 1926, and V1030, which optionally are amino acid substitutions of D581R, I926R, and V1030G;
(iii) mutations at positions D581, 1926, V1030, and S1046, which optionally are amino acid substitutions of D581R, I926R, V1030G, and 51046G;
(iv) mutations at positions D581, G624, F626, 1926, V1030, E1035, and 51046, which optionally are amino acid substitutions of D581R, G624R, F626R, I926R, V1030G, E1035R, and 51046G; or
(v) mutations at positions D581, G624, F626, P868, 1926, V1030, E1035, and S1046, which optionally are amino acid substitutions of D581R, G624R, F626R, P868T, I926R, V1030G, E1035R, and 51046G.

5. The gene editing system of claim 1, wherein the Cas12i2 polypeptide comprises the amino acid sequence of SEQ ID NO: 449, 450, 451, 452, or 453.

6. The gene editing system of claim 1, which comprises the first nucleic acid encoding the Cas12i2 polypeptide.

7. The gene editing system of claim 6, wherein the first nucleic acid is a messenger RNA (mRNA), or wherein the first nucleic acid is included in a viral vector.

8. (canceled)

9. The gene editing system of claim 1, wherein the target sequence is within exon 1, exon 2, exon 3, exon 4, exon 5, exon 6, exon 7, or an intron of the STMN2 gene, and/or wherein the RNA guide comprises the sequence of any one of SEQ ID NOs: 4508, 4512, 4559, and 4561.

10. (canceled)

11. The gene editing system of claim 1, wherein the RNA guide comprises the sequence of any one of SEQ ID NOs: 4505, 4506, 4507, 4508, 4509, 4510, 4511, 4512, 4513, 4514, 4515, 4554, 4555, 4556, 4557, 4558, 4559, 4560, 4561, and 4562, or the second nucleic acid encodes an RNA guide comprising any one of SEQ ID NOs: 4505, 4506, 4507, 4508, 4509, 4510, 4511, 4512, 4513, 4514, 4515, 4554, 4555, 4556, 4557, 4558, 4559, 4560, 4561, and 4562.

12. (canceled)

13. The gene editing system of claim 1, wherein the RNA guide comprises the spacer sequence and a direct repeat sequence, wherein the direct repeat sequence is at least 90% identical to any one of SEQ ID NOs: 1-10 or a fragment thereof that is at least 23-nucleotides in length.

14-16. (canceled)

17. The gene editing system of claim 13, wherein the direct repeat sequence is 5′-AGAAAUCCGUCUUUCAUUGACGG-3′ (SEQ ID NO: 10).

18. The gene editing system of claim 1, wherein the system comprises the second nucleic acid encoding the RNA guide, wherein the second nucleic acid encoding the RNA guide is located in a viral vector.

19. (canceled)

20. The gene editing system of claim 7, wherein the viral vector comprises the both the first nucleic acid encoding the Cas12i2 polypeptide and the second nucleic acid encoding the RNA guide.

21. The gene editing system of claim 1, wherein the system comprises the first nucleic acid encoding the Cas12i2 polypeptide, which is located on a first vector, and wherein the system comprises the second nucleic acid encoding the RNA guide, which is located on a second vector.

22. The gene editing system of claim 21, wherein the first and second vector are the same vector.

23-25. (canceled)

26. A gene editing system for genetic editing of a stathmin 2 (STMN2) gene, comprising
(i) a Cas12i polypeptide or a first nucleic acid encoding the Cas12i polypeptide, optionally wherein the Cas12i polypeptide is a Cas12i2 polypeptide; and
(ii) an RNA guide or a second nucleic acid encoding the RNA guide, wherein the RNA guide comprises a spacer sequence specific to a target sequence within exon 1, exon 2, exon 3, exon 4, exon 5, exon 6, exon 7, or an intron of a STMN2 gene, the target sequence being adjacent to a protospacer adjacent motif (PAM) comprising the motif of 5′-TTN-3′, which is located 5′ to the target sequence.

27-44. (canceled)

45. A pharmaceutical composition comprising the gene editing system of claim 1.

46. A kit comprising the elements (i) and (ii) of the gene editing system of claim 1.

47. A method for editing a stathmin 2 (STMN2) gene in a cell, the method comprising contacting a host cell with the gene editing system for editing the STMN2 gene of claim 1 to genetically edit the STMN2 gene in the host cell.

48-49. (canceled)

50. A cell comprising a disrupted stathmin 2 (STMN2) gene, wherein the cell optionally is produced by contacting a host cell with the gene editing system of claim 1 to genetically edit the STMN2 gene in the host cell, thereby disrupting the STMN2 gene.

51. A method for treating neurodegenerative diseases in a subject, comprising administering to a subject in need thereof the gene editing system for editing a stathmin 2 (STMN2) gene of claim 1 or the cell of claim 50.

52-53. (canceled)

54. An RNA guide, comprising (i) a spacer sequence that is specific to a target sequence in a stathmin 2 (STMN2) gene, wherein the target sequence is adjacent to a protospacer adjacent motif (PAM) comprising the motif of 5′-TTN-3′, which is located 5′ to the target sequence; and (ii) a direct repeat sequence.

55-62. (canceled)

The application's sequence listing, which the Patent Office published only in electronic form, follows.

SEQUENCE LISTING (4620 sequences)

SEQ ID NO: 1 - RNA, 36 nt, synthetic construct
  source 1..36: mol_type = other RNA
gttgcaaaacccaagaaatccgtctttcattgacgg

SEQ ID NO: 2 - RNA, 36 nt, synthetic construct
  source 1..36: mol_type = other RNA
aatagcggccctaagaaatccgtctttcattgacgg

SEQ ID NO: 3 - RNA, 36 nt, synthetic construct
  source 1..36: mol_type = other RNA
attggaactggcgagaaatccgtctttcattgacgg

SEQ ID NO: 4 - RNA, 36 nt, synthetic construct
  source 1..36: mol_type = other RNA
ccagcaacacctaagaaatccgtctttcattgacgg

SEQ ID NO: 5 - RNA, 36 nt, synthetic construct
  source 1..36: mol_type = other RNA
cggcgctcgaataggaaatccgtctttcattgacgg

SEQ ID NO: 6 - RNA, 36 nt, synthetic construct
  source 1..36: mol_type = other RNA
gtggcaacacctaagaaatccgtctttcattgacgg

SEQ ID NO: 7 - RNA, 36 nt, synthetic construct
  source 1..36: mol_type = other RNA
gttgcaacacctaagaaatccgtctttcattgacgg

SEQ ID NO: 8 - RNA, 36 nt, synthetic construct
  source 1..36: mol_type = other RNA
gttgcaatgcctaagaaatccgtctttcattgacgg

SEQ ID NO: 9 - RNA, 34 nt, synthetic construct
  source 1..34: mol_type = other RNA
gcaacacctaagaaatccgtctttcattgacggg

SEQ ID NO: 10 - RNA, 23 nt, synthetic construct
  source 1..23: mol_type = other RNA
agaaatccgtctttcattgacgg

SEQ ID NO: 11 - DNA, 30 bp, Homo sapiens
  source 1..30: mol_type = unassigned DNA
ccttcgccactgctcagcgtctgcacatcc

SEQ ID NO: 12 - DNA, 30 bp, Homo sapiens
  source 1..30: mol_type = unassigned DNA
gccactgctcagcgtctgcacatccctaca

SEQ ID NO: 13 - DNA, 30 bp, Homo sapiens
  source 1..30: mol_type = unassigned DNA
gccttcgccactgctcagcgtctgcacatc

SEQ ID NO: 14 - DNA, 30 bp, Homo sapiens
  source 1..30: mol_type = unassigned DNA
cccattgctgttttagccattgtagggatg

SEQ ID NO: 15 - DNA, 30 bp, Homo sapiens
  source 1..30: mol_type = unassigned DNA
ctgttttagccattgtagggatgtgcagac

SEQ ID NO: 16 - DNA, 30 bp, Homo sapiens
  source 1..30: mol_type = unassigned DNA
tagccattgtagggatgtgcagacgctgag

SEQ ID NO: 17 - DNA, 30 bp, Homo sapiens
  source 1..30: mol_type = unassigned DNA
agccattgtagggatgtgcagacgctgagc

SEQ ID NO: 18 - DNA, 30 bp, Homo sapiens
  source 1..30: mol_type = unassigned DNA
gccattgtagggatgtgcagacgctgagca

SEQ ID NO: 19 - DNA, 30 bp, Homo sapiens
  source 1..30: mol_type = unassigned DNA
tagggatgtgcagacgctgagcagtggcga

SEQ ID NO: 20 - DNA, 29 bp, Homo sapiens
  source 1..29: mol_type = unassigned DNA
tccgtcggctctacctggagcccacctct

SEQ ID NO: 21 - DNA, 30 bp, Homo sapiens
  source 1..30: mol_type = unassigned DNA
gttttctaagccagggaggttttgaaagat

SEQ ID NO: 22 - DNA, 30 bp, Homo sapiens
  source 1..30: mol_type = unassigned DNA
caaaacctccctggcttagaaaaccaaatt

SEQ ID NO: 23 - DNA, 30 bp, Homo sapiens
  source 1..30: mol_type = unassigned DNA
aaaacctccctggcttagaaaaccaaattt

SEQ ID NO: 24 - DNA, 30 bp, Homo sapiens
  source 1..30: mol_type = unassigned DNA
gaaaaccaaatttttgtagagagagatggg

SEQ ID NO: 25 - DNA, 30 bp, Homo sapiens
  source 1..30: mol_type = unassigned DNA
ggttttctaagccagggaggttttgaaaga

SEQ ID NO: 26 - DNA, 30 bp, Homo sapiens
  source 1..30: mol_type = unassigned DNA
tgtagagagagatgggtagaatctaatttt

SEQ ID NO: 27 - DNA, 30 bp, Homo sapiens
  source 1..30: mol_type = unassigned DNA
ttgtagagagagatgggtagaatctaattt

SEQ ID NO: 28 - DNA, 30 bp, Homo sapiens
  source 1..30: mol_type = unassigned DNA
gattctacccatctctctctacaaaaattt

SEQ ID NO: 29 - DNA, 30 bp, Homo sapiens
  source 1..30: mol_type = unassigned DNA
tacccatctctctctacaaaaatttggttt

SEQ ID NO: 30 - DNA, 30 bp, Homo sapiens
  source 1..30: mol_type = unassigned DNA
gaataaaattagattctacccatctctctc

SEQ ID NO: 31 - DNA, 30 bp, Homo sapiens
  source 1..30: mol_type = unassigned DNA
agaataaaattagattctacccatctctct

SEQ ID NO: 32 - DNA, 30 bp, Homo sapiens
  source 1..30: mol_type = unassigned DNA
ctttagaataaaattagattctacccatct

SEQ ID NO: 33 - DNA, 30 bp, Homo sapiens
  source 1..30: mol_type = unassigned DNA
taaagcaattagcattacatcatcacagca

SEQ ID NO: 34 - DNA, 30 bp, Homo sapiens
  source 1..30: mol_type = unassigned DNA
ttctaaagcaattagcattacatcatcaca

SEQ ID NO: 35 - DNA, 30 bp, Homo sapiens
  source 1..30: mol_type = unassigned DNA
tattctaaagcaattagcattacatcatca

SEQ ID NO: 36 - DNA, 30 bp, Homo sapiens
  source 1..30: mol_type = unassigned DNA
attctaaagcaattagcattacatcatcac

SEQ ID NO: 37 - DNA, 30 bp, Homo sapiens
  source 1..30: mol_type = unassigned DNA
gtagagagagatgggtagaatctaatttta

SEQ ID NO: 38 - DNA, 30 bp, Homo sapiens
  source 1..30: mol_type = unassigned DNA
tagagagagatgggtagaatctaattttat

SEQ ID NO: 39 - DNA, 20 bp, Homo sapiens
  source 1..20: mol_type = unassigned DNA
gcattacatcatcacagcag

SEQ ID NO: 40 - DNA, 27 bp, Homo sapiens
  source 1..27: mol_type = unassigned DNA
tctaagccagggaggttttgaaagatt

SEQ ID NO: 41 - DNA, 26 bp, Homo sapiens
  source 1..26: mol_type = unassigned DNA
ctaagccagggaggttttgaaagatt

SEQ ID NO: 42 - DNA, 25 bp, Homo sapiens
  source 1..25: mol_type = unassigned DNA
taagccagggaggttttgaaagatt

SEQ ID NO: 43 - DNA, 30 bp, Homo sapiens
  source 1..30: mol_type = unassigned DNA
cgaggttccgggtaaaagcaagagcagatc

SEQ ID NO: 44 - DNA, 30 bp, Homo sapiens
  source 1..30: mol_type = unassigned DNA
taggctgaaatgaaaagctgaagattagta

SEQ ID NO: 45 - DNA, 30 bp, Homo sapiens
  source 1..30: mol_type = unassigned DNA
cgggtaaaagcaagagcagatcagtgacag

SEQ ID NO: 46 - DNA, 30 bp, Homo sapiens
  source 1..30: mol_type = unassigned DNA
ccttgtaggctgaaatgaaaagctgaagat

SEQ ID NO: 47 - DNA, 30 bp, Homo sapiens
  source 1..30: mol_type = unassigned DNA
tccttgtaggctgaaatgaaaagctgaaga

SEQ ID NO: 48 - DNA, 30 bp, Homo sapiens
  source 1..30: mol_type = unassigned DNA
ttccttgtaggctgaaatgaaaagctgaag

SEQ ID NO: 49 - DNA, 30 bp, Homo sapiens
  source 1..30: mol_type = unassigned DNA
tttccttgtaggctgaaatgaaaagctgaa

SEQ ID NO: 50 - DNA, 30 bp, Homo sapiens
  source 1..30: mol_type = unassigned DNA
attttttccttgtaggctgaaatgaaaagc

SEQ ID NO: 51 - DNA, 30 bp, Homo sapiens
  source 1..30: mol_type = unassigned DNA
agaaaaaatgaaatatactaatcttcagct

SEQ ID NO: 52 - DNA, 30 bp, Homo sapiens
  source 1..30: mol_type = unassigned DNA
agcttttcatttcagcctacaaggaaaaaa

SEQ ID NO: 53 - DNA, 30 bp, Homo sapiens
  source 1..30: mol_type = unassigned DNA
tcatttcagcctacaaggaaaaaatgaagg

SEQ ID NO: 54 - DNA, 30 bp, Homo sapiens
  source 1..30: mol_type = unassigned DNA
cttgtaggctgaaatgaaaagctgaagatt

SEQ ID NO: 55 - DNA, 30 bp, Homo sapiens
  source 1..30: mol_type = unassigned DNA
atttcagcctacaaggaaaaaatgaaggag

SEQ ID NO: 56 - DNA, 30 bp, Homo sapiens
  source 1..30: mol_type = unassigned DNA
catttcagcctacaaggaaaaaatgaagga

SEQ ID NO: 57 - DNA, 30 bp, Homo sapiens
  source 1..30: mol_type = unassigned DNA
ctcaccatcgtaagtatagatgttgatgtt

SEQ ID NO: 58 - DNA, 30 bp, Homo sapiens
  source 1..30: mol_type = unassigned DNA
caaatgatctagctagcaggggtatgtcta

SEQ ID NO: 59 - DNA, 30 bp, Homo sapiens
  source 1..30: mol_type = unassigned DNA
ccaaatgatctagctagcaggggtatgtct

SEQ ID NO: 60 - DNA, 30 bp, Homo sapiens
  source 1..30: mol_type = unassigned DNA
cgatggtgagtaacctaggatagacatacc

SEQ ID NO: 61 - DNA, 30 bp, Homo sapiens
  source 1..30: mol_type = unassigned DNA
cccggaacctcgcaacatcaacatctatac

SEQ ID NO: 62 - DNA, 30 bp, Homo sapiens
  source 1..30: mol_type = unassigned DNA
atgttgcgaggttccgggtaaaagcaagag

SEQ ID NO: 63 - DNA, 30 bp, Homo sapiens
  source 1..30: mol_type = unassigned DNA
tacccggaacctcgcaacatcaacatctat

SEQ ID NO: 64 - DNA, 30 bp, Homo sapiens
  source 1..30: mol_type = unassigned DNA
cttttacccggaacctcgcaacatcaacat

SEQ ID NO: 65 - DNA, 30 bp, Homo sapiens
  source 1..30: mol_type = unassigned DNA
agcctacaaggaaaaaatgaaggagctgtc

SEQ ID NO: 66 - DNA, 30 bp, Homo sapiens
  source 1..30: mol_type = unassigned DNA
cagcctacaaggaaaaaatgaaggagctgt

SEQ ID NO: 67 - DNA, 30 bp, Homo sapiens
  source 1..30: mol_type = unassigned DNA
acccggaacctcgcaacatcaacatctata

SEQ ID NO: 68 - DNA, 27 bp, Homo sapiens
  source 1..27: mol_type = unassigned DNA
gtatatttcattttttctgaatttctc

SEQ ID NO: 69 - DNA, 30 bp, Homo sapiens
  source 1..30: mol_type = unassigned DNA
ttctggatctcctccagggacaggtctttc

SEQ ID NO: 70 - DNA, 30 bp, Homo sapiens
  source 1..30: mol_type = unassigned DNA
tggatctcctccagggacaggtctttcttc

SEQ ID NO: 71 - DNA, 30 bp, Homo sapiens
  source 1..30: mol_type = unassigned DNA
cttctttggagaagctaaagttcgtggggc

SEQ ID NO: 72 - DNA, 30 bp, Homo sapiens
  source 1..30: mol_type = unassigned DNA
ttctttggagaagctaaagttcgtggggct

SEQ ID NO: 73 - DNA, 30 bp, Homo sapiens
  source 1..30: mol_type = unassigned DNA
tttggagaagctaaagttcgtggggcttct

SEQ ID NO: 74 - DNA, 30 bp, Homo sapiens
  source 1..30: mol_type = unassigned DNA
ggagaagctaaagttcgtggggcttctgag

SEQ ID NO: 75 - DNA, 30 bp, Homo sapiens
  source 1..30: mol_type = unassigned DNA
gagaagctaaagttcgtggggcttctgaga

SEQ ID NO: 76 - DNA, 30 bp, Homo sapiens
  source 1..30: mol_type = unassigned DNA
gtggggcttctgagataggagatggtggct

SEQ ID NO: 77 - DNA, 30 bp, Homo sapiens
  source 1..30: mol_type = unassigned DNA
tgagataggagatggtggcttcaagatcag

SEQ ID NO: 78 - DNA, 30 bp, Homo sapiens
  source 1..30: mol_type = unassigned DNA
ttgatttgcttcacttccatatctgaaaag

SEQ ID NO: 79 - DNA, 30 bp, Homo sapiens
  source 1..30: mol_type = unassigned DNA
gttgatttgcttcacttccatatctgaaaa

SEQ ID NO: 80 - DNA, 30 bp, Homo sapiens
  source 1..30: mol_type = unassigned DNA
atttgcttcacttccatatctgaaaagtga

SEQ ID NO: 81 - DNA, 30 bp, Homo sapiens
  source 1..30: mol_type = unassigned DNA
gcttcacttccatatctgaaaagtgaacat

SEQ ID NO: 82 - DNA, 30 bp, Homo sapiens
  source 1..30: mol_type = unassigned DNA
cttcacttccatatctgaaaagtgaacatt

SEQ ID NO: 83 - DNA, 30 bp, Homo sapiens
  source 1..30: mol_type = unassigned DNA
acttccatatctgaaaagtgaacatttgag

SEQ ID NO: 84 - DNA, 30 bp, Homo sapiens
  source 1..30: mol_type = unassigned DNA
catatctgaaaagtgaacatttgagaatgt

SEQ ID NO: 85 - DNA, 30 bp, Homo sapiens
  source 1..30: mol_type = unassigned DNA
gagaatgttaagcatacaaagcttgcagca

SEQ ID NO: 86 - DNA, 30 bp, Homo sapiens
  source 1..30: mol_type = unassigned DNA
agaatgttaagcatacaaagcttgcagcat

SEQ ID NO: 87 - DNA, 30 bp, Homo sapiens
  source 1..30: mol_type = unassigned DNA
cttctggatctcctccagggacaggtcttt

SEQ ID NO: 88 - DNA, 30 bp, Homo sapiens
  source 1..30: mol_type = unassigned DNA
aagatcagctcaaaagcctggccagaggca

SEQ ID NO: 89 - DNA, 30 bp, Homo sapiens
  source 1..30: mol_type = unassigned DNA
ctctgcagcctccagtttcttctggatctc

SEQ ID NO: 90 - DNA, 30 bp, Homo sapiens
  source 1..30: mol_type = unassigned DNA
agatatggaagtgaagcaaatcaacaaacg

SEQ ID NO: 91 - DNA, 30 bp, Homo sapiens
  source 1..30: mol_type = unassigned DNA
tttcctctgcagcctccagtttcttctgga

SEQ ID NO: 92 - DNA, 30 bp, Homo sapiens
  source 1..30: mol_type = unassigned DNA
tatgcttaacattctcaaatgttcactttt

SEQ ID NO: 93 - DNA, 30 bp, Homo sapiens
  source 1..30: mol_type = unassigned DNA
acattctcaaatgttcacttttcagatatg

SEQ ID NO: 94 - DNA, 30 bp, Homo sapiens
  source 1..30: mol_type = unassigned DNA
tcaaatgttcacttttcagatatggaagtg

SEQ ID NO: 95 - DNA, 30 bp, Homo sapiens
  source 1..30: mol_type = unassigned DNA
acttttcagatatggaagtgaagcaaatca

SEQ ID NO: 96 - DNA, 30 bp, Homo sapiens
  source 1..30: mol_type = unassigned DNA
tcagatatggaagtgaagcaaatcaacaaa

SEQ ID NO: 97 - DNA, 30 bp, Homo sapiens
  source 1..30: mol_type = unassigned DNA
cagatatggaagtgaagcaaatcaacaaac

SEQ ID NO: 98 - DNA, 30 bp, Homo sapiens
  source 1..30: mol_type = unassigned DNA
tgagctgatcttgaagccaccatctcctat

SEQ ID NO: 99 - DNA, 30 bp, Homo sapiens
  source 1..30: mol_type = unassigned DNA
gagctgatcttgaagccaccatctcctatc

SEQ ID NO: 100 - DNA, 30 bp, Homo sapiens
  source 1..30: mol_type = unassigned DNA
agctgatcttgaagccaccatctcctatct

SEQ ID NO: 101 - DNA, 30 bp, Homo sapiens
  source 1..30: mol_type = unassigned DNA
aagccaccatctcctatctcagaagcccca

SEQ ID NO: 102 - DNA, 30 bp, Homo sapiens
  source 1..30: mol_type = unassigned DNA
agcttctccaaagaagaaagacctgtccct

SEQ ID NO: 103 - DNA, 30 bp, Homo sapiens
  source 1..30: mol_type = unassigned DNA
gcttctccaaagaagaaagacctgtccctg

SEQ ID NO: 104 - DNA, 30 bp, Homo sapiens
  source 1..30: mol_type = unassigned DNA
tccaaagaagaaagacctgtccctggagga

SEQ ID NO: 105 - DNA, 30 bp, Homo sapiens
  source 1..30: mol_type = unassigned DNA
ttccataggttttccttctctctctccctc

SEQ ID NO: 106 - DNA, 30 bp, Homo sapiens
  source 1..30: mol_type = unassigned DNA
tccataggttttccttctctctctccctcc

SEQ ID NO: 107 - DNA, 30 bp, Homo sapiens
  source 1..30: mol_type = unassigned DNA
ccataggttttccttctctctctccctccc

SEQ ID NO: 108 - DNA, 30 bp, Homo sapiens
  source 1..30: mol_type = unassigned DNA
cataggttttccttctctctctccctcccc

SEQ ID NO: 109 - DNA, 30 bp, Homo sapiens
  source 1..30: mol_type = unassigned DNA
tccttctctctctccctcccctgctcctcc

SEQ ID NO: 110 - DNA, 30 bp, Homo sapiens
  source 1..30: mol_type = unassigned DNA
cctttcttctttcctctgcagcctccagtt

SEQ ID NO: 111 - DNA, 30 bp, Homo sapiens
  source 1..30: mol_type = unassigned DNA
cttctttcctctgcagcctccagtttcttc

SEQ ID NO: 112 - DNA, 30 bp, Homo sapiens
  source 1..30: mol_type = unassigned DNA
ttctttcctctgcagcctccagtttcttct

SEQ ID NO: 113 - DNA, 30 bp, Homo sapiens
  source 1..30: mol_type = unassigned DNA
cctctgcagcctccagtttcttctggatct

SEQ ID NO: 114 - DNA, 30 bp, Homo sapiens
  source 1..30: mol_type = unassigned DNA
gtatgcttaacattctcaaatgttcacttt

SEQ ID NO: 115 - DNA, 29 bp, Homo sapiens
  source 1..29: mol_type = unassigned DNA
ccttctctctctccctcccctgctcctcc

SEQ ID NO: 116 - DNA, 28 bp, Homo sapiens
  source 1..28: mol_type = unassigned DNA
cttctctctctccctcccctgctcctcc

SEQ ID NO: 117 - DNA, 24 bp, Homo sapiens
  source 1..24: mol_type = unassigned DNA
tctctctccctcccctgctcctcc

SEQ ID NO: 118 - DNA, 23 bp, Homo sapiens
  source 1..23: mol_type = unassigned DNA
agcatacaaagcttgcagcatgg

SEQ ID NO: 119 - DNA, 30 bp, Homo sapiens
  source 1..30: mol_type = unassigned DNA
gtgtttggataattataagatggctatgtt

SEQ ID NO: 120 - DNA, 30 bp, Homo sapiens
  source 1..30: mol_type = unassigned DNA
ctgcagacgttcaataatagcagctagatt

SEQ ID NO: 121 - DNA, 30 bp, Homo sapiens
  source 1..30: mol_type = unassigned DNA
aggatcagcttttcctccgccatcttgctg

SEQ ID NO: 122 - DNA, 30 bp, Homo sapiens
  source 1..30: mol_type = unassigned DNA
tcctccgccatcttgctgaagttgttgttc

SEQ ID NO: 123 - DNA, 30 bp, Homo sapiens
  source 1..30: mol_type = unassigned DNA
cctccgccatcttgctgaagttgttgttct

SEQ ID NO: 124 - DNA, 30 bp, Homo sapiens
  source 1..30: mol_type = unassigned DNA
ctccgccatcttgctgaagttgttgttctc

SEQ ID NO: 125 - DNA, 30 bp, Homo sapiens
  source 1..30: mol_type = unassigned DNA
ctgaagttgttgttctcctccaaagccttc

SEQ ID NO: 126 - DNA, 30 bp, Homo sapiens
  source 1..30: mol_type = unassigned DNA
ttgttctcctccaaagccttctgaaggact

SEQ ID NO: 127 - DNA, 30 bp, Homo sapiens
  source 1..30: mol_type = unassigned DNA
ttctcctccaaagccttctgaaggacttct

SEQ ID NO: 128 - DNA, 30 bp, Homo sapiens
  source 1..30: mol_type = unassigned DNA
tcctccaaagccttctgaaggacttctcgc

SEQ ID NO: 129 - DNA, 30 bp, Homo sapiens
  source 1..30: mol_type = unassigned DNA
tgaaggacttctcgctcgtgttccctcttc

SEQ ID NO: 130 - DNA, 30 bp, Homo sapiens
  source 1..30: mol_type = unassigned DNA
caggatcagcttttcctccgccatcttgct

SEQ ID NO: 131 - DNA, 30 bp, Homo sapiens
  source 1..30: mol_type = unassigned DNA
tcgctcgtgttccctcttctctgccaattg

SEQ ID NO: 132 - DNA, 30 bp, Homo sapiens
  source 1..30: mol_type = unassigned DNA
tctgccaattgtttcagcacctgggcctcc

SEQ ID NO: 133 - DNA, 30 bp, Homo sapiens
  source 1..30: mol_type = unassigned DNA
tttcagcacctgggcctcctgagactgggg

SEQ ID NO: 134 - DNA, 30 bp, Homo sapiens
  source 1..30: mol_type = unassigned DNA
cagcacctgggcctcctgagactggggaag

SEQ ID NO: 135 - DNA, 30 bp, Homo sapiens
  source 1..30: mol_type = unassigned DNA
agcacctgggcctcctgagactggggaaga

SEQ ID NO: 136 - DNA, 30 bp, Homo sapiens
  source 1..30: mol_type = unassigned DNA
aataatagcagctagattagcctcacggtt

SEQ ID NO: 137 - DNA, 30 bp, Homo sapiens
  source 1..30: mol_type = unassigned DNA
cctgcagacgttcaataatagcagctagat

SEQ ID NO: 138 - DNA, 30 bp, Homo sapiens
  source 1..30: mol_type = unassigned DNA
tcctgcagacgttcaataatagcagctaga

SEQ ID NO: 139 - DNA, 30 bp, Homo sapiens
  source 1..30: mol_type = unassigned DNA
ccttttcctgcagacgttcaataatagcag

SEQ ID NO: 140 - DNA, 30 bp, Homo sapiens
  source 1..30: mol_type = unassigned DNA
aacgtctgcaggaaaaggtaatctcagcag

SEQ ID NO: 141 - DNA, 30 bp, Homo sapiens
  source 1..30: mol_type = unassigned DNA
cctcttctctgccaattgtttcagcacctg

SEQ ID NO: 142 - DNA, 30 bp, Homo sapiens
  source 1..30: mol_type = unassigned DNA
tcaggatcagcttttcctccgccatcttgc

SEQ ID NO: 143 - DNA, 30 bp, Homo sapiens
  source 1..30: mol_type = unassigned DNA
cattttcaggatcagcttttcctccgccat

SEQ ID NO: 144 - DNA, 30 bp, Homo sapiens
  source 1..30: mol_type = unassigned DNA
agaaggctttggaggagaacaacaacttca

SEQ ID NO: 145 - DNA, 30 bp, Homo sapiens
  source 1..30: mol_type = unassigned DNA
gataattataagatggctatgtttttcttc

SEQ ID NO: 146 - DNA, 30 bp, Homo sapiens
  source 1..30: mol_type = unassigned DNA
taagatggctatgtttttcttccccagtct

SEQ ID NO: 147 - DNA, 30 bp, Homo sapiens
  source 1..30: mol_type = unassigned DNA
ttcttccccagtctcaggaggcccaggtgc

SEQ ID NO: 148 - DNA, 30 bp, Homo sapiens
  source 1..30: mol_type = unassigned DNA
tcttccccagtctcaggaggcccaggtgct

SEQ ID NO: 149 - DNA, 30 bp, Homo sapiens
  source 1..30: mol_type = unassigned DNA
cttccccagtctcaggaggcccaggtgctg

SEQ ID NO: 150 - DNA, 30 bp, Homo sapiens
  source 1..30: mol_type = unassigned DNA
ttccccagtctcaggaggcccaggtgctga

SEQ ID NO: 151 - DNA, 30 bp, Homo sapiens
  source 1..30: mol_type = unassigned DNA
cccagtctcaggaggcccaggtgctgaaac

SEQ ID NO: 152 - DNA, 30 bp, Homo sapiens
  source 1..30: mol_type = unassigned DNA
gcagagaagagggaacacgagcgagaagtc

SEQ ID NO: 153 - DNA, 30 bp, Homo sapiens
  source 1..30: mol_type = unassigned DNA
ttccattttcaggatcagcttttcctccgc

SEQ ID NO: 154 - DNA, 30 bp, Homo sapiens
  source 1..30: mol_type = unassigned DNA
ggataattataagatggctatgtttttctt

SEQ ID NO: 155 - DNA, 30 bp, Homo sapiens
  source 1..30: mol_type = unassigned DNA
ggaggagaacaacaacttcagcaagatggc

SEQ ID NO: 156 - DNA, 30 bp, Homo sapiens
  source 1..30: mol_type = unassigned DNA
agcaagatggcggaggaaaagctgatcctg

SEQ ID NO: 157 - DNA, 30 bp, Homo sapiens
  source 1..30: mol_type = unassigned DNA
aggaaaaccgtgaggctaatctagctgcta

SEQ ID NO: 158 - DNA, 30 bp, Homo sapiens
  source 1..30: mol_type = unassigned DNA
ttgaacgtctgcaggaaaaggtaatctcag

SEQ ID NO: 159 - DNA, 30 bp, Homo sapiens
  source 1..30: mol_type = unassigned DNA
gcctcacggttttccttaatttgttccatt

SEQ ID NO: 160 - DNA, 30 bp, Homo sapiens
  source 1..30: mol_type = unassigned DNA
tccttaatttgttccattttcaggatcagc

SEQ ID NO: 161 - DNA, 30 bp, Homo sapiens
  source 1..30: mol_type = unassigned DNA
ccttaatttgttccattttcaggatcagct

SEQ ID NO: 162 - DNA, 30 bp, Homo sapiens
  source 1..30: mol_type = unassigned DNA
cttaatttgttccattttcaggatcagctt

SEQ ID NO: 163 - DNA, 30 bp, Homo sapiens
  source 1..30: mol_type = unassigned DNA
atttgttccattttcaggatcagcttttcc

SEQ ID NO: 164 - DNA, 30 bp, Homo sapiens
  source 1..30: mol_type = unassigned DNA
gttccattttcaggatcagcttttcctccg

SEQ ID NO: 165 - DNA, 30 bp, Homo sapiens
  source 1..30: mol_type = unassigned DNA
gaggagaacaacaacttcagcaagatggcg

SEQ ID NO: 166 - DNA, 30 bp, Homo sapiens
  source 1..30: mol_type = unassigned DNA
tgtttggataattataagatggctatgttt

SEQ ID NO: 167 - DNA, 23 bp, Homo sapiens
  source 1..23: mol_type = unassigned DNA
taattatccaaacacaaacctag

SEQ ID NO: 168 - DNA, 30 bp, Homo sapiens
  source 1..30: mol_type = unassigned DNA
agaagaaataaacttgaccagctataaagt

SEQ ID NO: 169 - DNA, 30 bp, Homo sapiens
  source 1..30: mol_type = unassigned DNA
tcgttaaactctattaatctcaaggagtct

SEQ ID NO: 170 - DNA, 30 bp, Homo sapiens
  source 1..30: mol_type = unassigned DNA
gttcagaagaaataaacttgaccagctata

SEQ ID NO: 171 - DNA, 30 bp, Homo sapiens
  source 1..30: mol_type = unassigned DNA
accagctataaagtaaaacttatcgttaaa

SEQ ID NO: 172 - DNA, 30 bp, Homo sapiens
  source 1..30: mol_type = unassigned DNA
tagttcagaagaaataaacttgaccagcta

SEQ ID NO: 173 - DNA, 30 bp, Homo sapiens
  source 1..30: mol_type = unassigned DNA
agattaatagagtttaacgataagttttac

SEQ ID NO: 174 - DNA, 30 bp, Homo sapiens
  source 1..30: mol_type = unassigned DNA
atagagtttaacgataagttttactttata

SEQ ID NO: 175 - DNA, 30 bp, Homo sapiens
  source 1..30: mol_type = unassigned DNA
aacgataagttttactttatagctggtcaa

SEQ ID NO: 176 - DNA, 30 bp, Homo sapiens
  source 1..30: mol_type = unassigned DNA
acgataagttttactttatagctggtcaag

SEQ ID NO: 177 - DNA, 30 bp, Homo sapiens
  source 1..30: mol_type = unassigned DNA
tactttatagctggtcaagtttatttcttc

SEQ ID NO: 178 - DNA, 30 bp, Homo sapiens
  source 1..30: mol_type = unassigned DNA
actttatagctggtcaagtttatttcttct

SEQ ID NO: 179 - DNA, 30 bp, Homo sapiens
  source 1..30: mol_type = unassigned DNA
ctttatagctggtcaagtttatttcttctg

SEQ ID NO: 180 - DNA, 30 bp, Homo sapiens
  source 1..30: mol_type = unassigned DNA
atagctggtcaagtttatttcttctgaact

SEQ ID NO: 181 - DNA, 30 bp, Homo sapiens
  source 1..30: mol_type = unassigned DNA
tagctggtcaagtttatttcttctgaacta

SEQ ID NO: 182 - DNA, 30 bp, Homo sapiens
  source 1..30: mol_type = unassigned DNA
atttcttctgaactaaaagaatctatagag

SEQ ID NO: 183 - DNA, 30 bp, Homo sapiens
  source 1..30: mol_type = unassigned DNA
tttcttctgaactaaaagaatctatagagt

SEQ ID NO: 184 - DNA, 30 bp, Homo sapiens
  source 1..30: mol_type = unassigned DNA
cttctgaactaaaagaatctatagagtctc

SEQ ID NO: 185 - DNA, 30 bp, Homo sapiens
  source 1..30: mol_type = unassigned DNA
ttctgaactaaaagaatctatagagtctca

SEQ ID NO: 186 - DNA, 30 bp, Homo sapiens
  source 1..30: mol_type = unassigned DNA
tgaactaaaagaatctatagagtctcaatt

SEQ ID NO: 187 - DNA, 30 bp, Homo sapiens
  source 1..30: mol_type = unassigned DNA
ctggagcttcagagggaaggagagaagcaa

SEQ ID NO: 188 - DNA, 30 bp, Homo sapiens
  source 1..30: mol_type = unassigned DNA
tggagcttcagagggaaggagagaagcaat

SEQ ID NO: 189 - DNA, 30 bp, Homo sapiens
  source 1..30: mol_type = unassigned DNA
agagggaaggagagaagcaatgtaagcaac

SEQ ID NO: 190 - DNA, 30 bp, Homo sapiens
  source 1..30: mol_type = unassigned DNA
ttttagttcagaagaaataaacttgaccag

SEQ ID NO: 191 - DNA, 30 bp, Homo sapiens
  source 1..30: mol_type = unassigned DNA
agactctatagattcttttagttcagaaga

SEQ ID NO: 192 - DNA, 30 bp, Homo sapiens
  source 1..30: mol_type = unassigned DNA
cctctgaagctccagaaattgagactctat

SEQ ID NO: 193 - DNA, 30 bp, Homo sapiens
  source 1..30: mol_type = unassigned DNA
tctccttccctctgaagctccagaaattga

SEQ ID NO: 194 - DNA, 30 bp, Homo sapiens
  source 1..30: mol_type = unassigned DNA
cttctctccttccctctgaagctccagaaa

SEQ ID NO: 195 - DNA, 30 bp, Homo sapiens
  source 1..30: mol_type = unassigned DNA
cattgcttctctccttccctctgaagctcc

SEQ ID NO: 196 - DNA, 30 bp, Homo sapiens
  source 1..30: mol_type = unassigned DNA
agttcagaagaaataaacttgaccagctat

SEQ ID NO: 197 - DNA, 30 bp, Homo sapiens
  source 1..30: mol_type = unassigned DNA
tgtagaatgttgcttacattgcttctctcc

SEQ ID NO: 198 - DNA, 30 bp, Homo sapiens
  source 1..30: mol_type = unassigned DNA
tatttctgtagaatgttgcttacattgctt

SEQ ID NO: 199 - DNA, 30 bp, Homo sapiens
  source 1..30: mol_type = unassigned DNA
atatttctgtagaatgttgcttacattgct

SEQ ID NO: 200 - DNA, 30 bp, Homo sapiens
  source 1..30: mol_type = unassigned DNA
tttatatttctgtagaatgttgcttacatt

SEQ ID NO: 201 - DNA, 30 bp, Homo sapiens
  source 1..30: mol_type = unassigned DNA
gtagtattatttatatttctgtagaatgtt

SEQ ID NO: 202 - DNA, 30 bp, Homo sapiens
  source 1..30: mol_type = unassigned DNA
ttagtagtattatttatatttctgtagaat

SEQ ID NO: 203 - DNA, 30 bp, Homo sapiens
  source 1..30: mol_type = unassigned DNA
tacagaaatataaataatactactaataat

SEQ ID NO: 204 - DNA, 30 bp, Homo sapiens
  source 1..30: mol_type = unassigned DNA
ctgtagaatgttgcttacattgcttctctc

SEQ ID NO: 205 - DNA, 30 bp, Homo sapiens
  source 1..30: mol_type = unassigned DNA
cttacattgcttctctccttccctctgaag

SEQ ID NO: 206 - DNA, 27 bp, Homo sapiens
  source 1..27: mol_type = unassigned DNA
aactctattaatctcaaggagtctaca

SEQ ID NO: 207 - DNA, 30 bp, Homo sapiens
  source 1..30: mol_type = unassigned DNA
gtgttttttaggagaggcatgctgcggagg

SEQ ID NO: 208 - DNA, 30 bp, Homo sapiens
  source 1..30: mol_type = unassigned DNA
ttcttccttttgtgttttttaggagaggca

SEQ ID NO: 209 - DNA, 30 bp, Homo sapiens
  source 1..30: mol_type = unassigned DNA
tgttttttaggagaggcatgctgcggaggt

SEQ ID NO: 210 - DNA, 30 bp, Homo sapiens
  source 1..30: mol_type = unassigned DNA
tttaggagaggcatgctgcggaggtgcgca

SEQ ID NO: 211 - DNA, 30 bp, Homo sapiens
  source 1..30: mol_type = unassigned DNA
cttttgtgttttttaggagaggcatgctgc

SEQ ID NO: 212 - DNA, 30 bp, Homo sapiens
  source 1..30: mol_type = unassigned DNA
taggagaggcatgctgcggaggtgcgcagg

SEQ ID NO: 213 - DNA, 30 bp, Homo sapiens
  source 1..30: mol_type = unassigned DNA
aggagaggcatgctgcggaggtgcgcagga

SEQ ID NO: 214 - DNA, 30 bp, Homo sapiens
  source 1..30: mol_type = unassigned DNA
ggagaggcatgctgcggaggtgcgcaggaa

SEQ ID NO: 215 - DNA, 30 bp, Homo sapiens
  source 1..30: mol_type = unassigned DNA
aactgtctggctgaagcaagggagggtctg

SEQ ID NO: 216 - DNA, 30 bp, Homo sapiens
  source 1..30: mol_type = unassigned DNA
actattggtggggcgtgccagaccctccct

SEQ ID NO: 217 - DNA, 30 bp, Homo sapiens
  source 1..30: mol_type = unassigned DNA
cttcttccttttgtgttttttaggagaggc

SEQ ID NO: 218 - DNA, 30 bp, Homo sapiens
  source 1..30: mol_type = unassigned DNA
ctattggtggggcgtgccagaccctccctt

SEQ ID NO: 219 - DNA, 30 bp, Homo sapiens
  source 1..30: mol_type = unassigned DNA
cttcagccagacagttcaacctggagttcc

SEQ ID NO: 220 - DNA, 30 bp, Homo sapiens
  source 1..30: mol_type = unassigned DNA
agccagacagttcaacctggagttccttgt

SEQ ID NO: 221 - DNA, 30 bp, Homo sapiens
  source 1..30: mol_type = unassigned DNA
aacctggagttccttgttcctgcgcacctc

SEQ ID NO: 222 - DNA, 30 bp, Homo sapiens
  source 1..30: mol_type = unassigned DNA
cttgttcctgcgcacctccgcagcatgcct

SEQ ID NO: 223 - DNA, 30 bp, Homo sapiens
  source 1..30: mol_type = unassigned DNA
ttcctgcgcacctccgcagcatgcctctcc

SEQ ID NO: 224 - DNA, 30 bp, Homo sapiens
  source 1..30: mol_type = unassigned DNA
ctgcgcacctccgcagcatgcctctcctaa

SEQ ID NO: 225 - DNA, 30 bp, Homo sapiens
  source 1..30: mol_type = unassigned DNA
tgtgttttttaggagaggcatgctgcggag

SEQ ID NO: 226 - DNA, 30 bp, Homo sapiens
  source 1..30: mol_type = unassigned DNA
ttccttttgtgttttttaggagaggcatgc

SEQ ID NO: 227 - DNA, 30 bp, Homo sapiens
  source 1..30: mol_type = unassigned DNA
gtggggcgtgccagaccctcccttgcttca

SEQ ID NO: 228 - DNA, 30 bp, Homo sapiens
  source 1..30: mol_type = unassigned DNA
ttaggagaggcatgctgcggaggtgcgcag

SEQ ID NO: 229 - RNA, 30 nt, Homo sapiens
  source 1..30: mol_type = unassigned RNA
ccttcgccactgctcagcgtctgcacatcc

SEQ ID NO: 230 - RNA, 30 nt, Homo sapiens
  source 1..30: mol_type = unassigned RNA
gccactgctcagcgtctgcacatccctaca

SEQ ID NO: 231 - RNA, 30 nt, Homo sapiens
  source 1..30: mol_type = unassigned RNA
gccttcgccactgctcagcgtctgcacatc

SEQ ID NO: 232 - RNA, 30 nt, Homo sapiens
  source 1..30: mol_type = unassigned RNA
cccattgctgttttagccattgtagggatg

SEQ ID NO: 233 - RNA, 30 nt, Homo sapiens
  source 1..30: mol_type = unassigned RNA
ctgttttagccattgtagggatgtgcagac

SEQ ID NO: 234 - RNA, 30 nt, Homo sapiens
  source 1..30: mol_type = unassigned RNA
tagccattgtagggatgtgcagacgctgag

SEQ ID NO: 235 - RNA, 30 nt, Homo sapiens
  source 1..30: mol_type = unassigned RNA
agccattgtagggatgtgcagacgctgagc

SEQ ID NO: 236 - RNA, 30 nt, Homo sapiens
  source 1..30: mol_type = unassigned RNA
gccattgtagggatgtgcagacgctgagca

SEQ ID NO: 237 - RNA, 30 nt, Homo sapiens
  source 1..30: mol_type = unassigned RNA
tagggatgtgcagacgctgagcagtggcga

SEQ ID NO: 238 - RNA, 29 nt, Homo sapiens
  source 1..29: mol_type = unassigned RNA
tccgtcggctctacctggagcccacctct

SEQ ID NO: 239 - RNA, 30 nt, Homo sapiens
  source 1..30: mol_type = unassigned RNA
gttttctaagccagggaggttttgaaagat

SEQ ID NO: 240 - RNA, 30 nt, Homo sapiens
  source 1..30: mol_type = unassigned RNA
caaaacctccctggcttagaaaaccaaatt

SEQ ID NO: 241 - RNA, 30 nt, Homo sapiens
  source 1..30: mol_type = unassigned RNA
aaaacctccctggcttagaaaaccaaattt

SEQ ID NO: 242 - RNA, 30 nt, Homo sapiens
  source 1..30: mol_type = unassigned RNA
gaaaaccaaatttttgtagagagagatggg

SEQ ID NO: 243 - RNA, 30 nt, Homo sapiens
  source 1..30: mol_type = unassigned RNA
ggttttctaagccagggaggttttgaaaga

SEQ ID NO: 244 - RNA, 30 nt, Homo sapiens
  source 1..30: mol_type = unassigned RNA
tgtagagagagatgggtagaatctaatttt

SEQ ID NO: 245 - RNA, 30 nt, Homo sapiens
  source 1..30: mol_type = unassigned RNA
ttgtagagagagatgggtagaatctaattt

SEQ ID NO: 246 - RNA, 30 nt, Homo sapiens
  source 1..30: mol_type = unassigned RNA
gattctacccatctctctctacaaaaattt

SEQ ID NO: 247 - RNA, 30 nt, Homo sapiens
  source 1..30: mol_type = unassigned RNA
tacccatctctctctacaaaaatttggttt

SEQ ID NO: 248 - RNA, 30 nt, Homo sapiens
  source 1..30: mol_type = unassigned RNA
gaataaaattagattctacccatctctctc

SEQ ID NO: 249 - RNA, 30 nt, Homo sapiens
  source 1..30: mol_type = unassigned RNA
agaataaaattagattctacccatctctct

SEQ ID NO: 250 - RNA, 30 nt, Homo sapiens
  source 1..30: mol_type = unassigned RNA
ctttagaataaaattagattctacccatct

SEQ ID NO: 251 - RNA, 30 nt, Homo sapiens
  source 1..30: mol_type = unassigned RNA
taaagcaattagcattacatcatcacagca

SEQ ID NO: 252 - RNA, 30 nt, Homo sapiens
  source 1..30: mol_type = unassigned RNA
ttctaaagcaattagcattacatcatcaca

SEQ ID NO: 253 - RNA, 30 nt, Homo sapiens
  source 1..30: mol_type = unassigned RNA
tattctaaagcaattagcattacatcatca

SEQ ID NO: 254 - RNA, 30 nt, Homo sapiens
  source 1..30: mol_type = unassigned RNA
attctaaagcaattagcattacatcatcac

SEQ ID NO: 255 - RNA, 30 nt, Homo sapiens
  source 1..30: mol_type = unassigned RNA
gtagagagagatgggtagaatctaatttta

SEQ ID NO: 256 - RNA, 30 nt, Homo sapiens
  source 1..30: mol_type = unassigned RNA
tagagagagatgggtagaatctaattttat

SEQ ID NO: 257 - RNA, 20 nt, Homo sapiens
  source 1..20: mol_type = unassigned RNA
gcattacatcatcacagcag

SEQ ID NO: 258 - RNA, 27 nt, Homo sapiens
  source 1..27: mol_type = unassigned RNA
tctaagccagggaggttttgaaagatt

SEQ ID NO: 259 - RNA, 26 nt, Homo sapiens
  source 1..26: mol_type = unassigned RNA
ctaagccagggaggttttgaaagatt

SEQ ID NO: 260 - RNA, 25 nt, Homo sapiens
  source 1..25: mol_type = unassigned RNA
taagccagggaggttttgaaagatt

SEQ ID NO: 261 - RNA, 30 nt, Homo sapiens
  source 1..30: mol_type = unassigned RNA
cgaggttccgggtaaaagcaagagcagatc

SEQ ID NO: 262 - RNA, 30 nt, Homo sapiens
  source 1..30: mol_type = unassigned RNA
taggctgaaatgaaaagctgaagattagta

SEQ ID NO: 263 - RNA, 30 nt, Homo sapiens
  source 1..30: mol_type = unassigned RNA
cgggtaaaagcaagagcagatcagtgacag

SEQ ID NO: 264 - RNA, 30 nt, Homo sapiens
  source 1..30: mol_type = unassigned RNA
ccttgtaggctgaaatgaaaagctgaagat

SEQ ID NO: 265 - RNA, 30 nt, Homo sapiens
  source 1..30: mol_type = unassigned RNA
tccttgtaggctgaaatgaaaagctgaaga

SEQ ID NO: 266 - RNA, 30 nt, Homo sapiens
  source 1..30: mol_type = unassigned RNA
ttccttgtaggctgaaatgaaaagctgaag

SEQ ID NO: 267 - RNA, 30 nt, Homo sapiens
  source 1..30: mol_type = unassigned RNA
tttccttgtaggctgaaatgaaaagctgaa

SEQ ID NO: 268 - RNA, 30 nt, Homo sapiens
  source 1..30: mol_type = unassigned RNA
attttttccttgtaggctgaaatgaaaagc

SEQ ID NO: 269 - RNA, 30 nt, Homo sapiens
  source 1..30: mol_type = unassigned RNA
agaaaaaatgaaatatactaatcttcagct

SEQ ID NO: 270 - RNA, 30 nt, Homo sapiens
  source 1..30: mol_type = unassigned RNA
agcttttcatttcagcctacaaggaaaaaa

SEQ ID NO: 271 - RNA, 30 nt, Homo sapiens
  source 1..30: mol_type = unassigned RNA
tcatttcagcctacaaggaaaaaatgaagg

SEQ ID NO: 272 - RNA, 30 nt, Homo sapiens
  source 1..30: mol_type = unassigned RNA
cttgtaggctgaaatgaaaagctgaagatt

SEQ ID NO: 273 - RNA, 30 nt, Homo sapiens
  source 1..30: mol_type = unassigned RNA
atttcagcctacaaggaaaaaatgaaggag

SEQ ID NO: 274 - RNA, 30 nt, Homo sapiens
  source 1..30: mol_type = unassigned RNA
catttcagcctacaaggaaaaaatgaagga

SEQ ID NO: 275 - RNA, 30 nt, Homo sapiens
  source 1..30: mol_type = unassigned RNA
ctcaccatcgtaagtatagatgttgatgtt

SEQ ID NO: 276 - RNA, 30 nt, Homo sapiens
  source 1..30: mol_type = unassigned RNA
caaatgatctagctagcaggggtatgtcta

SEQ ID NO: 277 - RNA, 30 nt, Homo sapiens
  source 1..30: mol_type = unassigned RNA
ccaaatgatctagctagcaggggtatgtct

SEQ ID NO: 278 - RNA, 30 nt, Homo sapiens
  source 1..30: mol_type = unassigned RNA
cgatggtgagtaacctaggatagacatacc

SEQ ID NO: 279 - RNA, 30 nt, Homo sapiens
  source 1..30: mol_type = unassigned RNA
cccggaacctcgcaacatcaacatctatac

SEQ ID NO: 280 - RNA, 30 nt, Homo sapiens
  source 1..30: mol_type = unassigned RNA
atgttgcgaggttccgggtaaaagcaagag

SEQ ID NO: 281 - RNA, 30 nt, Homo sapiens
  source 1..30: mol_type = unassigned RNA
tacccggaacctcgcaacatcaacatctat

SEQ ID NO: 282 - RNA, 30 nt, Homo sapiens
  source 1..30: mol_type = unassigned RNA
cttttacccggaacctcgcaacatcaacat

SEQ ID NO: 283 - RNA, 30 nt, Homo sapiens
  source 1..30: mol_type = unassigned RNA
agcctacaaggaaaaaatgaaggagctgtc

SEQ ID NO: 284 - RNA, 30 nt, Homo sapiens
  source 1..30: mol_type = unassigned RNA
cagcctacaaggaaaaaatgaaggagctgt

SEQ ID NO: 285 - RNA, 30 nt, Homo sapiens
  source 1..30: mol_type = unassigned RNA
acccggaacctcgcaacatcaacatctata

SEQ ID NO: 286 - RNA, 27 nt, Homo sapiens
  source 1..27: mol_type = unassigned RNA
gtatatttcattttttctgaatttctc

SEQ ID NO: 287 - RNA, 30 nt, Homo sapiens
  source 1..30: mol_type = unassigned RNA
ttctggatctcctccagggacaggtctttc

SEQ ID NO: 288 - RNA, 30 nt, Homo sapiens
  source 1..30: mol_type = unassigned RNA
tggatctcctccagggacaggtctttcttc

SEQ ID NO: 289 - RNA, 30 nt, Homo sapiens
  source 1..30: mol_type = unassigned RNA
cttctttggagaagctaaagttcgtggggc

SEQ ID NO: 290 - RNA, 30 nt, Homo sapiens
  source 1..30: mol_type = unassigned RNA
ttctttggagaagctaaagttcgtggggct

SEQ ID NO: 291 - RNA, 30 nt, Homo sapiens
  source 1..30: mol_type = unassigned RNA
tttggagaagctaaagttcgtggggcttct

SEQ ID NO: 292 - RNA, 30 nt, Homo sapiens
  source 1..30: mol_type = unassigned RNA
ggagaagctaaagttcgtggggcttctgag

SEQ ID NO: 293 - RNA, 30 nt, Homo sapiens
  source 1..30: mol_type = unassigned RNA
gagaagctaaagttcgtggggcttctgaga

SEQ ID NO: 294 - RNA, 30 nt, Homo sapiens
  source 1..30: mol_type = unassigned RNA
gtggggcttctgagataggagatggtggct

SEQ ID NO: 295 - RNA, 30 nt, Homo sapiens
  source 1..30: mol_type = unassigned RNA
tgagataggagatggtggcttcaagatcag

SEQ ID NO: 296 - RNA, 30 nt, Homo sapiens
  source 1..30: mol_type = unassigned RNA
ttgatttgcttcacttccatatctgaaaag

SEQ ID NO: 297 - RNA, 30 nt, Homo sapiens
  source 1..30: mol_type = unassigned RNA
gttgatttgcttcacttccatatctgaaaa

SEQ ID NO: 298 - RNA, 30 nt, Homo sapiens
  source 1..30: mol_type = unassigned RNA
atttgcttcacttccatatctgaaaagtga

SEQ ID NO: 299 - RNA, 30 nt, Homo sapiens
  source 1..30: mol_type = unassigned RNA
gcttcacttccatatctgaaaagtgaacat

SEQ ID NO: 300 - RNA, 30 nt, Homo sapiens
  source 1..30: mol_type = unassigned RNA
cttcacttccatatctgaaaagtgaacatt

SEQ ID NO: 301 - RNA, 30 nt, Homo sapiens
  source 1..30: mol_type = unassigned RNA
acttccatatctgaaaagtgaacatttgag

SEQ ID NO: 302 - RNA, 30 nt, Homo sapiens
  source 1..30: mol_type = unassigned RNA
catatctgaaaagtgaacatttgagaatgt

SEQ ID NO: 303 - RNA, 30 nt, Homo sapiens
  source 1..30: mol_type = unassigned RNA
gagaatgttaagcatacaaagcttgcagca

SEQ ID NO: 304 - RNA, 30 nt, Homo sapiens
  source 1..30: mol_type = unassigned RNA
agaatgttaagcatacaaagcttgcagcat

SEQ ID NO: 305 - RNA, 30 nt, Homo sapiens
  source 1..30: mol_type = unassigned RNA
cttctggatctcctccagggacaggtcttt

SEQ ID NO: 306 - RNA, 30 nt, Homo sapiens
  source 1..30: mol_type = unassigned RNA
aagatcagctcaaaagcctggccagaggca

SEQ ID NO: 307 - RNA, 30 nt, Homo sapiens
  source 1..30: mol_type = unassigned RNA
ctctgcagcctccagtttcttctggatctc

SEQ ID NO: 308 - RNA, 30 nt, Homo sapiens
  source 1..30: mol_type = unassigned RNA
agatatggaagtgaagcaaatcaacaaacg

SEQ ID NO: 309 - RNA, 30 nt, Homo sapiens
  source 1..30: mol_type = unassigned RNA
tttcctctgcagcctccagtttcttctgga

SEQ ID NO: 310 - RNA, 30 nt, Homo sapiens
  source 1..30: mol_type = unassigned RNA
tatgcttaacattctcaaatgttcactttt

SEQ ID NO: 311 - RNA, 30 nt, Homo sapiens
  source 1..30: mol_type = unassigned RNA
acattctcaaatgttcacttttcagatatg

SEQ ID NO: 312 - RNA, 30 nt, Homo sapiens
  source 1..30: mol_type = unassigned RNA
tcaaatgttcacttttcagatatggaagtg

SEQ ID NO: 313 - RNA, 30 nt, Homo sapiens
  source 1..30: mol_type = unassigned RNA
acttttcagatatggaagtgaagcaaatca

SEQ ID NO: 314 - RNA, 30 nt, Homo sapiens
  source 1..30: mol_type = unassigned RNA
tcagatatggaagtgaagcaaatcaacaaa

SEQ ID NO: 315 - RNA, 30 nt, Homo sapiens
  source 1..30: mol_type = unassigned RNA
cagatatggaagtgaagcaaatcaacaaac

SEQ ID NO: 316 - RNA, 30 nt, Homo sapiens
  source 1..30: mol_type = unassigned RNA
tgagctgatcttgaagccaccatctcctat

SEQ ID NO: 317 - RNA, 30 nt, Homo sapiens
  source 1..30: mol_type = unassigned RNA
gagctgatcttgaagccaccatctcctatc

SEQ ID NO: 318 - RNA, 30 nt, Homo sapiens
  source 1..30: mol_type = unassigned RNA
agctgatcttgaagccaccatctcctatct

SEQ ID NO: 319 - RNA, 30 nt, Homo sapiens
  source 1..30: mol_type = unassigned RNA
aagccaccatctcctatctcagaagcccca

SEQ ID NO: 320 - RNA, 30 nt, Homo sapiens
  source 1..30: mol_type = unassigned RNA
agcttctccaaagaagaaagacctgtccct

SEQ ID NO: 321 - RNA, 30 nt, Homo sapiens
  source 1..30: mol_type = unassigned RNA
gcttctccaaagaagaaagacctgtccctg

SEQ ID NO: 322 - RNA, 30 nt, Homo sapiens
  source 1..30: mol_type = unassigned RNA
tccaaagaagaaagacctgtccctggagga

SEQ ID NO: 323 - RNA, 30 nt, Homo sapiens
  source 1..30: mol_type = unassigned RNA
ttccataggttttccttctctctctccctc

SEQ ID NO: 324 - RNA, 30 nt, Homo sapiens
  source 1..30: mol_type = unassigned RNA
tccataggttttccttctctctctccctcc

SEQ ID NO: 325 - RNA, 30 nt, Homo sapiens
  source 1..30: mol_type = unassigned RNA
ccataggttttccttctctctctccctccc

SEQ ID NO: 326 - RNA, 30 nt, Homo sapiens
  source 1..30: mol_type = unassigned RNA
cataggttttccttctctctctccctcccc

SEQ ID NO: 327 - RNA, 30 nt, Homo sapiens
  source 1..30: mol_type = unassigned RNA
tccttctctctctccctcccctgctcctcc

SEQ ID NO: 328 - RNA, 30 nt, Homo sapiens
  source 1..30: mol_type = unassigned RNA
cctttcttctttcctctgcagcctccagtt

SEQ ID NO: 329 - RNA, 30 nt, Homo sapiens
  source 1..30: mol_type = unassigned RNA
cttctttcctctgcagcctccagtttcttc

SEQ ID NO: 330 - RNA, 30 nt, Homo sapiens
  source 1..30: mol_type = unassigned RNA
ttctttcctctgcagcctccagtttcttct

SEQ ID NO: 331 - RNA, 30 nt, Homo sapiens
  source 1..30: mol_type = unassigned RNA
cctctgcagcctccagtttcttctggatct

SEQ ID NO: 332 - RNA, 30 nt, Homo sapiens
  source 1..30: mol_type = unassigned RNA
gtatgcttaacattctcaaatgttcacttt

SEQ ID NO: 333 - RNA, 29 nt, Homo sapiens
  source 1..29: mol_type = unassigned RNA
ccttctctctctccctcccctgctcctcc

SEQ ID NO: 334 - RNA, 28 nt, Homo sapiens
  source 1..28: mol_type = unassigned RNA
cttctctctctccctcccctgctcctcc

SEQ ID NO: 335 - RNA, 24 nt, Homo sapiens
  source 1..24: mol_type = unassigned RNA
tctctctccctcccctgctcctcc

SEQ ID NO: 336 - RNA, 23 nt, Homo sapiens
  source 1..23: mol_type = unassigned RNA
agcatacaaagcttgcagcatgg

SEQ ID NO: 337 - RNA, 30 nt, Homo sapiens
  source 1..30: mol_type = unassigned RNA
gtgtttggataattataagatggctatgtt

SEQ ID NO: 338 - RNA, 30 nt, Homo sapiens
  source 1..30: mol_type = unassigned RNA
ctgcagacgttcaataatagcagctagatt

SEQ ID NO: 339 - RNA, 30 nt, Homo sapiens
  source 1..30: mol_type = unassigned RNA
aggatcagcttttcctccgccatcttgctg

SEQ ID NO: 340 - RNA, 30 nt, Homo sapiens
  source 1..30: mol_type = unassigned RNA
tcctccgccatcttgctgaagttgttgttc

SEQ ID NO: 341 - RNA, 30 nt, Homo sapiens
  source 1..30: mol_type = unassigned RNA
cctccgccatcttgctgaagttgttgttct

SEQ ID NO: 342 - RNA, 30 nt, Homo sapiens
  source 1..30: mol_type = unassigned RNA
ctccgccatcttgctgaagttgttgttctc

SEQ ID NO: 343 - RNA, 30 nt, Homo sapiens
  source 1..30: mol_type = unassigned RNA
ctgaagttgttgttctcctccaaagccttc

SEQ ID NO: 344 - RNA, 30 nt, Homo sapiens
  source 1..30: mol_type = unassigned RNA
ttgttctcctccaaagccttctgaaggact

SEQ ID NO: 345 - RNA, 30 nt, Homo sapiens
  source 1..30: mol_type = unassigned RNA
ttctcctccaaagccttctgaaggacttct

SEQ ID NO: 346 - RNA, 30 nt, Homo sapiens
  source 1..30: mol_type = unassigned RNA
tcctccaaagccttctgaaggacttctcgc

SEQ ID NO: 347 - RNA, 30 nt, Homo sapiens
  source 1..30: mol_type = unassigned RNA
tgaaggacttctcgctcgtgttccctcttc

SEQ ID NO: 348 - RNA, 30 nt, Homo sapiens
  source 1..30: mol_type = unassigned RNA
caggatcagcttttcctccgccatcttgct

SEQ ID NO: 349 - RNA, 30 nt, Homo sapiens
  source 1..30: mol_type = unassigned RNA
tcgctcgtgttccctcttctctgccaattg

SEQ ID NO: 350 - RNA, 30 nt, Homo sapiens
  source 1..30: mol_type = unassigned RNA
tctgccaattgtttcagcacctgggcctcc

SEQ ID NO: 351 - RNA, 30 nt, Homo sapiens
  source 1..30: mol_type = unassigned RNA
tttcagcacctgggcctcctgagactgggg

SEQ ID NO: 352 - RNA, 30 nt, Homo sapiens
  source 1..30: mol_type = unassigned RNA
cagcacctgggcctcctgagactggggaag

SEQ ID NO: 353 - RNA, 30 nt, Homo sapiens
  source 1..30: mol_type = unassigned RNA
agcacctgggcctcctgagactggggaaga

SEQ ID NO: 354 - RNA, 30 nt, Homo sapiens
  source 1..30: mol_type = unassigned RNA
aataatagcagctagattagcctcacggtt

SEQ ID NO: 355 - RNA, 30 nt, Homo sapiens
  source 1..30: mol_type = unassigned RNA
cctgcagacgttcaataatagcagctagat

SEQ ID NO: 356 - RNA, 30 nt, Homo sapiens
  source 1..30: mol_type = unassigned RNA
tcctgcagacgttcaataatagcagctaga

SEQ ID NO: 357 - RNA, 30 nt, Homo sapiens
  source 1..30: mol_type = unassigned RNA
ccttttcctgcagacgttcaataatagcag

SEQ ID NO: 358 - RNA, 30 nt, Homo sapiens
  source 1..30: mol_type = unassigned RNA
aacgtctgcaggaaaaggtaatctcagcag

SEQ ID NO: 359 - RNA, 30 nt, Homo sapiens
  source 1..30: mol_type = unassigned RNA
cctcttctctgccaattgtttcagcacctg

SEQ ID NO: 360 - RNA, 30 nt, Homo sapiens
  source 1..30: mol_type = unassigned RNA
tcaggatcagcttttcctccgccatcttgc

SEQ ID NO: 361 - RNA, 30 nt, Homo sapiens
  source 1..30: mol_type = unassigned RNA
cattttcaggatcagcttttcctccgccat

SEQ ID NO: 362 - RNA, 30 nt, Homo sapiens
  source 1..30: mol_type = unassigned RNA
agaaggctttggaggagaacaacaacttca

SEQ ID NO: 363 - RNA, 30 nt, Homo sapiens
  source 1..30: mol_type = unassigned RNA
gataattataagatggctatgtttttcttc

SEQ ID NO: 364 - RNA, 30 nt, Homo sapiens
  source 1..30: mol_type = unassigned RNA
taagatggctatgtttttcttccccagtct

SEQ ID NO: 365 - RNA, 30 nt, Homo sapiens
  source 1..30: mol_type = unassigned RNA
ttcttccccagtctcaggaggcccaggtgc

SEQ ID NO: 366 - RNA, 30 nt, Homo sapiens
  source 1..30: mol_type = unassigned RNA
tcttccccagtctcaggaggcccaggtgct

SEQ ID NO: 367 - RNA, 30 nt, Homo sapiens
  source 1..30: mol_type = unassigned RNA
cttccccagtctcaggaggcccaggtgctg

SEQ ID NO: 368 - RNA, 30 nt, Homo sapiens
  source 1..30: mol_type = unassigned RNA
ttccccagtctcaggaggcccaggtgctga

SEQ ID NO: 369 - RNA, 30 nt, Homo sapiens
  source 1..30: mol_type = unassigned RNA
cccagtctcaggaggcccaggtgctgaaac

SEQ ID NO: 370 - RNA, 30 nt, Homo sapiens
  source 1..30: mol_type = unassigned RNA
gcagagaagagggaacacgagcgagaagtc

SEQ ID NO: 371 - RNA, 30 nt, Homo sapiens
  source 1..30: mol_type = unassigned RNA
ttccattttcaggatcagcttttcctccgc

SEQ ID NO: 372 - RNA, 30 nt, Homo sapiens
  source 1..30: mol_type = unassigned RNA
ggataattataagatggctatgtttttctt

SEQ ID NO: 373 - RNA, 30 nt, Homo sapiens
  source 1..30: mol_type = unassigned RNA
ggaggagaacaacaacttcagcaagatggc

SEQ ID NO: 374 - RNA, 30 nt, Homo sapiens
  source 1..30: mol_type = unassigned RNA
agcaagatggcggaggaaaagctgatcctg

SEQ ID NO: 375 - RNA, 30 nt, Homo sapiens
  source 1..30: mol_type = unassigned RNA
aggaaaaccgtgaggctaatctagctgcta

SEQ ID NO: 376 - RNA, 30 nt, Homo sapiens
  source 1..30: mol_type = unassigned RNA
ttgaacgtctgcaggaaaaggtaatctcag

SEQ ID NO: 377 - RNA, 30 nt, Homo sapiens
  source 1..30: mol_type = unassigned RNA
gcctcacggttttccttaatttgttccatt

SEQ ID NO: 378 - RNA, 30 nt, Homo sapiens
  source 1..30: mol_type = unassigned RNA
tccttaatttgttccattttcaggatcagc

SEQ ID NO: 379 - RNA, 30 nt, Homo sapiens
  source 1..30: mol_type = unassigned RNA
ccttaatttgttccattttcaggatcagct

SEQ ID NO: 380 - RNA, 30 nt, Homo sapiens
  source 1..30: mol_type = unassigned RNA
cttaatttgttccattttcaggatcagctt

SEQ ID NO: 381 - RNA, 30 nt, Homo sapiens
  source 1..30: mol_type = unassigned RNA
atttgttccattttcaggatcagcttttcc

SEQ ID NO: 382 - RNA, 30 nt, Homo sapiens
  source 1..30: mol_type = unassigned RNA
gttccattttcaggatcagcttttcctccg

SEQ ID NO: 383 - RNA, 30 nt, Homo sapiens
  source 1..30: mol_type = unassigned RNA
gaggagaacaacaacttcagcaagatggcg

SEQ ID NO: 384 - RNA, 30 nt, Homo sapiens
  source 1..30: mol_type = unassigned RNA
tgtttggataattataagatggctatgttt

SEQ ID NO: 385 - RNA, 23 nt, Homo sapiens
  source 1..23: mol_type = unassigned RNA
taattatccaaacacaaacctag

SEQ ID NO: 386 - RNA, 30 nt, Homo sapiens
  source 1..30: mol_type = unassigned RNA
agaagaaataaacttgaccagctataaagt

SEQ ID NO: 387 - RNA, 30 nt, Homo sapiens
  source 1..30: mol_type = unassigned RNA
tcgttaaactctattaatctcaaggagtct

SEQ ID NO: 388 - RNA, 30 nt, Homo sapiens
  source 1..30: mol_type = unassigned RNA
gttcagaagaaataaacttgaccagctata

SEQ ID NO: 389 - RNA, 30 nt, Homo sapiens
  source 1..30: mol_type = unassigned RNA
accagctataaagtaaaacttatcgttaaa

SEQ ID NO: 390 - RNA, 30 nt, Homo sapiens
  source 1..30: mol_type = unassigned RNA
tagttcagaagaaataaacttgaccagcta

SEQ ID NO: 391 - RNA, 30 nt, Homo sapiens
  source 1..30: mol_type = unassigned RNA
agattaatagagtttaacgataagttttac

SEQ ID NO: 392 - RNA, 30 nt, Homo sapiens
  source 1..30: mol_type = unassigned RNA
atagagtttaacgataagttttactttata

SEQ ID NO: 393 - RNA, 30 nt, Homo sapiens
  source 1..30: mol_type = unassigned RNA
aacgataagttttactttatagctggtcaa

SEQ ID NO: 394 - RNA, 30 nt, Homo sapiens
  source 1..30: mol_type = unassigned RNA
acgataagttttactttatagctggtcaag

SEQ ID NO: 395 - RNA, 30 nt, Homo sapiens
  source 1..30: mol_type = unassigned RNA
tactttatagctggtcaagtttatttcttc

SEQ ID NO: 396 - RNA, 30 nt, Homo sapiens
  source 1..30: mol_type = unassigned RNA
actttatagctggtcaagtttatttcttct

SEQ ID NO: 397 - RNA, 30 nt, Homo sapiens
  source 1..30: mol_type = unassigned RNA
ctttatagctggtcaagtttatttcttctg

SEQ ID NO: 398 - RNA, 30 nt, Homo sapiens
  source 1..30: mol_type = unassigned RNA
atagctggtcaagtttatttcttctgaact

SEQ ID NO: 399 - RNA, 30 nt, Homo sapiens
  source 1..30: mol_type = unassigned RNA
tagctggtcaagtttatttcttctgaacta

SEQ ID NO: 400 - RNA, 30 nt, Homo sapiens
  source 1..30: mol_type = unassigned RNA
atttcttctgaactaaaagaatctatagag

SEQ ID NO: 401 - RNA, 30 nt, Homo sapiens
  source 1..30: mol_type = unassigned RNA
tttcttctgaactaaaagaatctatagagt

SEQ ID NO: 402 - RNA, 30 nt, Homo sapiens
  source 1..30: mol_type = unassigned RNA
cttctgaactaaaagaatctatagagtctc

SEQ ID NO: 403 - RNA, 30 nt, Homo sapiens
  source 1..30: mol_type = unassigned RNA
ttctgaactaaaagaatctatagagtctca

SEQ ID NO: 404 - RNA, 30 nt, Homo sapiens
  source 1..30: mol_type = unassigned RNA
tgaactaaaagaatctatagagtctcaatt

SEQ ID NO: 405 - RNA, 30 nt, Homo sapiens
  source 1..30: mol_type = unassigned RNA
ctggagcttcagagggaaggagagaagcaa

SEQ ID NO: 406 - RNA, 30 nt, Homo sapiens
  source 1..30: mol_type = unassigned RNA
tggagcttcagagggaaggagagaagcaat

SEQ ID NO: 407 - RNA, 30 nt, Homo sapiens
  source 1..30: mol_type = unassigned RNA
agagggaaggagagaagcaatgtaagcaac

SEQ ID NO: 408 - RNA, 30 nt, Homo sapiens
  source 1..30: mol_type = unassigned RNA
ttttagttcagaagaaataaacttgaccag

SEQ ID NO: 409 - RNA, 30 nt, Homo sapiens
  source 1..30: mol_type = unassigned RNA
agactctatagattcttttagttcagaaga

SEQ ID NO: 410 - RNA, 30 nt, Homo sapiens
  source 1..30: mol_type = unassigned RNA
cctctgaagctccagaaattgagactctat

SEQ ID NO: 411 - RNA, 30 nt, Homo sapiens
  source 1..30: mol_type = unassigned RNA
tctccttccctctgaagctccagaaattga

SEQ ID NO: 412 - RNA, 30 nt, Homo sapiens
  source 1..30: mol_type = unassigned RNA
cttctctccttccctctgaagctccagaaa

SEQ ID NO: 413 - RNA, 30 nt, Homo sapiens
  source 1..30: mol_type = unassigned RNA
cattgcttctctccttccctctgaagctcc

SEQ ID NO: 414 - RNA, 30 nt, Homo sapiens
  source 1..30: mol_type = unassigned RNA
agttcagaagaaataaacttgaccagctat

SEQ ID NO: 415 - RNA, 30 nt, Homo sapiens
  source 1..30: mol_type = unassigned RNA
tgtagaatgttgcttacattgcttctctcc

SEQ ID NO: 416 - RNA, 30 nt, Homo sapiens
  source 1..30: mol_type = unassigned RNA
tatttctgtagaatgttgcttacattgctt

SEQ ID NO: 417 - RNA, 30 nt, Homo sapiens
  source 1..30: mol_type = unassigned RNA
atatttctgtagaatgttgcttacattgct

SEQ ID NO: 418 - RNA, 30 nt, Homo sapiens
  source 1..30: mol_type = unassigned RNA
tttatatttctgtagaatgttgcttacatt

SEQ ID NO: 419 - RNA, 30 nt, Homo sapiens
  source 1..30: mol_type = unassigned RNA
gtagtattatttatatttctgtagaatgtt

SEQ ID NO: 420 - RNA, 30 nt, Homo sapiens
  source 1..30: mol_type = unassigned RNA
ttagtagtattatttatatttctgtagaat

SEQ ID NO: 421 - RNA, 30 nt, Homo sapiens
  source 1..30: mol_type = unassigned RNA
tacagaaatataaataatactactaataat

SEQ ID NO: 422 - RNA, 30 nt, Homo sapiens
  source 1..30: mol_type = unassigned RNA
ctgtagaatgttgcttacattgcttctctc

SEQ ID NO: 423 - RNA, 30 nt, Homo sapiens
  source 1..30: mol_type = unassigned RNA
cttacattgcttctctccttccctctgaag

SEQ ID NO: 424 - RNA, 27 nt, Homo sapiens
  source 1..27: mol_type = unassigned RNA
aactctattaatctcaaggagtctaca

SEQ ID NO: 425 - RNA, 30 nt, Homo sapiens
  source 1..30: mol_type = unassigned RNA
gtgttttttaggagaggcatgctgcggagg

SEQ ID NO: 426 - RNA, 30 nt, Homo sapiens
  source 1..30: mol_type = unassigned RNA
ttcttccttttgtgttttttaggagaggca

SEQ ID NO: 427 - RNA, 30 nt, Homo sapiens
  source 1..30: mol_type = unassigned RNA
tgttttttaggagaggcatgctgcggaggt

SEQ ID NO: 428 - RNA, 30 nt, Homo sapiens
  source 1..30: mol_type = unassigned RNA
tttaggagaggcatgctgcggaggtgcgca

SEQ ID NO: 429 - RNA, 30 nt, Homo sapiens
  source 1..30: mol_type = unassigned RNA
cttttgtgttttttaggagaggcatgctgc

SEQ ID NO: 430 - RNA, 30 nt, Homo sapiens
  source 1..30: mol_type = unassigned RNA
taggagaggcatgctgcggaggtgcgcagg

SEQ ID NO: 431 - RNA, 30 nt, Homo sapiens
  source 1..30: mol_type = unassigned RNA
aggagaggcatgctgcggaggtgcgcagga

SEQ ID NO: 432 - RNA, 30 nt, Homo sapiens
  source 1..30: mol_type = unassigned RNA
ggagaggcatgctgcggaggtgcgcaggaa

SEQ ID NO: 433 - RNA, 30 nt, Homo sapiens
  source 1..30: mol_type = unassigned RNA
aactgtctggctgaagcaagggagggtctg

SEQ ID NO: 434 - RNA, 30 nt, Homo sapiens
  source 1..30: mol_type = unassigned RNA
actattggtggggcgtgccagaccctccct

SEQ ID NO: 435 - RNA, 30 nt, Homo sapiens
  source 1..30: mol_type = unassigned RNA
cttcttccttttgtgttttttaggagaggc

SEQ ID NO: 436 - RNA, 30 nt, Homo sapiens
  source 1..30: mol_type = unassigned RNA
ctattggtggggcgtgccagaccctccctt

SEQ ID NO: 437 - RNA, 30 nt, Homo sapiens
  source 1..30: mol_type = unassigned RNA
cttcagccagacagttcaacctggagttcc

SEQ ID NO: 438 - RNA, 30 nt, Homo sapiens
  source 1..30: mol_type = unassigned RNA
agccagacagttcaacctggagttccttgt

SEQ ID NO: 439 - RNA, 30 nt, Homo sapiens
  source 1..30: mol_type = unassigned RNA
aacctggagttccttgttcctgcgcacctc

SEQ ID NO: 440 - RNA, 30 nt, Homo sapiens
  source 1..30: mol_type = unassigned RNA
cttgttcctgcgcacctccgcagcatgcct

SEQ ID NO: 441 - RNA, 30 nt, Homo sapiens
  source 1..30: mol_type = unassigned RNA
ttcctgcgcacctccgcagcatgcctctcc

SEQ ID NO: 442 - RNA, 30 nt, Homo sapiens
  source 1..30: mol_type = unassigned RNA
ctgcgcacctccgcagcatgcctctcctaa

SEQ ID NO: 443 - RNA, 30 nt, Homo sapiens
  source 1..30: mol_type = unassigned RNA
tgtgttttttaggagaggcatgctgcggag

SEQ ID NO: 444 - RNA, 30 nt, Homo sapiens
  source 1..30: mol_type = unassigned RNA
ttccttttgtgttttttaggagaggcatgc

SEQ ID NO: 445 - RNA, 30 nt, Homo sapiens
  source 1..30: mol_type = unassigned RNA
gtggggcgtgccagaccctcccttgcttca

SEQ ID NO: 446 - RNA, 30 nt, Homo sapiens
  source 1..30: mol_type = unassigned RNA
ttaggagaggcatgctgcggaggtgcgcag

SEQ ID NO: 447 - DNA, 3162 bp, unidentified
  source 1..3162: mol_type = unassigned DNA
atgagcagcgcgatcaaaagctacaagagcgttctgcgtccgaacgagcgtaagaaccaactgctgaaaagcaccattcagtgcctggaagacggtagcgcgttctttttcaagatgctgcaaggcctgtttggtggcatcaccccggagattgttcgtttcagcaccgaacaggagaaacagcaacaggatatcgcgctgtggtgcgcggttaactggttccgtccggtgagccaagacagcctgacccacaccattgcgagcgataacctggtggagaagtttgaggaatactatggtggcaccgcgagcgacgcgatcaaacagtacttcagcgcgagcattggcgaaagctactattggaacgactgccgtcaacagtactatgatctgtgccgtgagctgggtgttgaggtgagcgacctgacccatgatctggagatcctgtgccgtgaaaagtgcctggcggttgcgaccgagagcaaccagaacaacagcatcattagcgttctgtttggcaccggcgaaaaagaggaccgtagcgtgaaactgcgtatcaccaagaaaattctggaggcgatcagcaacctgaaagaaatcccgaagaacgttgcgccgattcaagagatcattctgaacgtggcgaaagcgaccaaggaaaccttccgtcaggtgtatgcgggtaacctgggtgcgccgagcaccctggagaaatttatcgcgaaggacggccaaaaagagttcgatctgaagaaactgcagaccgacctgaagaaagttattcgtggtaaaagcaaggagcgtgattggtgctgccaggaagagctgcgtagctacgtggagcaaaacaccatccagtatgacctgtgggcgtggggcgaaatgttcaacaaagcgcacaccgcgctgaaaatcaagagcacccgtaactacaactttgcgaagcaacgtctggaacagttcaaagagattcagagcctgaacaacctgctggttgtgaagaagctgaacgactttttcgatagcgaatttttcagcggcgaggaaacctacaccatctgcgttcaccatctgggtggcaaggacctgagcaaactgtataaggcgtgggaggatgatccggcggacccggaaaacgcgattgtggttctgtgcgacgatctgaaaaacaactttaagaaagagccgatccgtaacattctgcgttacatcttcaccattcgtcaagaatgcagcgcgcaggacatcctggcggcggcgaagtacaaccaacagctggatcgttataaaagccaaaaggcgaacccgagcgttctgggtaaccagggctttacctggaccaacgcggtgatcctgccggagaaggcgcagcgtaacgaccgtccgaacagcctggatctgcgtatttggctgtacctgaaactgcgtcacccggacggtcgttggaagaaacaccatatcccgttctacgatacccgtttcttccaagaaatttatgcggcgggcaacagcccggttgacacctgccagtttcgtaccccgcgtttcggttatcacctgccgaaactgaccgatcagaccgcgatccgtgttaacaagaaacatgtgaaagcggcgaagaccgaggcgcgtattcgtctggcgatccaacagggcaccctgccggtgagcaacctgaagatcaccgaaattagcgcgaccatcaacagcaaaggtcaagtgcgtattccggttaagtttgacgtgggtcgtcaaaaaggcaccctgcagatcggtgaccgtttctgcggctacgatcaaaaccagaccgcgagccacgcgtatagcctgtgggaagtggttaaagagggtcaataccataaagagctgggctgctttgttcgtttcatcagcagcggtgacatcgtgagcattaccgagaaccgtggcaaccaatttgatcagctgagctatgaaggtctggcgtacccgcaatatgcggactggcgtaagaaagcgagcaagttcgtgagcctgtggcagatcaccaagaaaaacaagaaaaaggaaatcgtgaccgttgaagcgaaagagaagtttgacgcgatctgcaagtaccagccgcgtctgtataaattcaacaaggagtacgcgtatctgctgcgtgatattgttcgtggcaaaagcctggtggaactgcaacagattcgtcaagagatctttcgtttcattgaacaggactgcggtgttacccgtctgggcagcctgagcctgagcaccctggaaaccgtgaaagcggttaagggtatcatttacagctattttagcaccgcgctgaacgcgagcaagaacaacccgatcagcgacgaacagcgtaaagagtttgatccggaactgttcgcgctgctggaaaagctggagctgattcgtacccgtaaaaagaaacaaaaagtggaacgtatcgcgaacagcctgattcagacctgcctggagaacaacatcaagttcattcgtggtgaaggcgacctgagcaccaccaacaacgcgaccaagaaaaaggcgaacagccgtagcatggattggttggcgcgtggtgtttttaacaaaatccgtcaactggcgccgatgcacaacattaccctgttcggttgcggcagcctgtacaccagccaccaggacccgctggtgcatcgtaacccggataaagcgatgaagtgccgttgggcggcgatcccggttaaggacattggcgattgggtgctgcgtaagctgagccaaaacctgcgtgcgaaaaacatcggcaccggcgagtactatcaccaaggtgttaaagagttcctgagccattatgaactgcaggacctggaggaagagctgctgaagtggcgtagcgatcgtaaaagcaacattccgtgctgggtgctgcagaaccgtctggcggagaagctgggcaacaaagaagcggtggtttacatcccggttcgtggtggccgtatttattttgcgacccacaaggtggcgaccggtgcggtgagcatcgttttcgaccaaaaacaagtgtgggtttgcaacgcggatcatgttgcggcggcgaacatcgcgctgaccgtgaagggtattggcgaacaaagcagcgacgaagagaacccggatggtagccgtatcaaactgcagctgaccagc

SEQ ID NO: 448 - protein, 1054 aa, unidentified
MSSAIKSYKSVLRPNERKNQLLKSTIQCLEDGSAFFFKMLQGLFGGITPEIVRFSTEQEKQQQDIALWCAVNWFRPVSQDSLTHTIASDNLVEKFEEYYGGTASDAIKQYFSASIGESYYWNDCRQQYYDLCRELGVEVSDLTHDLEILCREKCLAVATESNQNNSIISVLFGTGEKEDRSVKLRITKKILEAISNLKEIPKNVAPIQEIILNVAKATKETFRQVYAGNLGAPSTLEKFIAKDGQKEFDLKKLQTDLKKVIRGKSKERDWCCQEELRSYVEQNTIQYDLWAWGEMFNKAHTALKIKSTRNYNFAKQRLEQFKEIQSLNNLLVVKKLNDFFDSEFFSGEETYTICVHHLGGKDLSKLYKAWEDDPADPENAIVVLCDDLKNNFKKEPIRNILRYIFTIRQECSAQDILAAAKYNQQLDRYKSQKANPSVLGNQGFTWTNAVILPEKAQRNDRPNSLDLRIWLYLKLRHPDGRWKKHHIPFYDTRFFQEIYAAGNSPVDTCQFRTPRFGYHLPKLTDQTAIRVNKKHVKAAKTEARIRLAIQQGTLPVSNLKITEISATINSKGQVRIPVKFDVGRQKGTLQIGDRFCGYDQNQTASHAYSLWEVVKEGQYHKELGCFVRFISSGDIVSITENRGNQFDQLSYEGLAYPQYADWRKKASKFVSLWQITKKNKKKEIVTVEAKEKFDAICKYQPRLYKFNKEYAYLLRDIVRGKSLVELQQIRQEIFRFIEQDCGVTRLGSLSLSTLETVKAVKGIIYSYFSTALNASKNNPISDEQRKEFDPELFALLEKLELIRTRKKKQKVERIANSLIQTCLENNIKFIRGEGDLSTTNNATKKKANSRSMDWLARGVFNKIRQLAPMHNITLFGCGSLYTSHQDPLVHRNPDKAMKCRWAAIPVKDIGDWVLRKLSQNLRAKNIGTGEYYHQGVKEFLSHYELQDLEEELLKWRSDRKSNIPCWVLQNRLAEKLGNKEAVVYIPVRGGRIYFATHKVATGAVSIVFDQKQVWVCNADHVAAANIALTVKGIGEQSSDEENPDGSRIKLQLTS

SEQ ID NO: 449 - protein, 1054 aa, synthetic construct
MSSAIKSYKSVLRPNERKNQLLKSTIQCLEDGSAFFFKMLQGLFGGITPEIVRFSTEQEKQQQDIALWCAVNWFRPVSQDSLTHTIASDNLVEKFEEYYGGTASDAIKQYFSASIGESYYWNDCRQQYYDLCRELGVEVSDLTHDLEILCREKCLAVATESNQNNSIISVLFGTGEKEDRSVKLRITKKILEAISNLKEIPKNVAPIQEIILNVAKATKETFRQVYAGNLGAPSTLEKFIAKDGQKEFDLKKLQTDLKKVIRGKSKERDWCCQEELRSYVEQNTIQYDLWAWGEMFNKAHTALKIKSTRNYNFAKQRLEQFKEIQSLNNLLVVKKLNDFFDSEFFSGEETYTICVHHLGGKDLSKLYKAWEDDPADPENAIVVLCDDLKNNFKKEPIRNILRYIFTIRQECSAQDILAAAKYNQQLDRYKSQKANPSVLGNQGFTWTNAVILPEKAQRNDRPNSLDLRIWLYLKLRHPDGRWKKHHIPFYDTRFFQEIYAAGNSPVDTCQFRTPRFGYHLPKLTDQTAIRVNKKHVKAAKTEARIRLAIQQGTLPVSNLKITEISATINSKGQVRIPVKFRVGRQKGTLQIGDRFCGYDQNQTASHAYSLWEVVKEGQYHKELGCFVRFISSGDIVSITENRGNQFDQLSYEGLAYPQYADWRKKASKFVSLWQITKKNKKKEIVTVEAKEKFDAICKYQPRLYKFNKEYAYLLRDIVRGKSLVELQQIRQEIFRFIEQDCGVTRLGSLSLSTLETVKAVKGIIYSYFSTALNASKNNPISDEQRKEFDPELFALLEKLELIRTRKKKQKVERIANSLIQTCLENNIKFIRGEGDLSTTNNATKKKANSRSMDWLARGVFNKIRQLAPMHNITLFGCGSLYTSHQDPLVHRNPDKAMKCRWAAIPVKDIGRWVLRKLSQNLRAKNRGTGEYYHQGVKEFLSHYELQDLEEELLKWRSDRKSNIPCWVLQNRLAEKLGNKEAVVYIPVRGGRIYFATHKVATGAVSIVFDQKQVWVCNADHVAAANIALTGKGIGEQSSDEENPDGSRIKLQLTS

SEQ ID NO: 450 - protein, 1054 aa, synthetic construct
MSSAIKSYKSVLRPNERKNQLLKSTIQCLEDGSAFFFKMLQGLFGGITPEIVRFSTEQEKQQQDIALWCAVNWFRPVSQDSLTHTIASDNLVEKFEEYYGGTASDAIKQYFSASIGESYYWNDCRQQYYDLCRELGVEVSDLTHDLEILCREKCLAVATESNQNNSIISVLFGTGEKEDRSVKLRITKKILEAISNLKEIPKNVAPIQEIILNVAKATKETFRQVYAGNLGAPSTLEKFIAKDGQKEFDLKKLQTDLKKVIRGKSKERDWCCQEELRSYVEQNTIQYDLWAWGEMFNKAHTALKIKSTRNYNFAKQRLEQFKEIQSLNNLLVVKKLNDFFDSEFFSGEETYTICVHHLGGKDLSKLYKAWEDDPADPENAIVVLCDDLKNNFKKEPIRNILRYIFTIRQECSAQDILAAAKYNQQLDRYKSQKANPSVLGNQGFTWTNAVILPEKAQRNDRPNSLDLRIWLYLKLRHPDGRWKKHHIPFYDTRFFQEIYAAGNSPVDTCQFRTPRFGYHLPKLTDQTAIRVNKKHVKAAKTEARIRLAIQQGTLPVSNLKITEISATINSKGQVRIPVKFRVGRQKGTLQIGDRFCGYDQNQTASHAYSLWEVVKEGQYHKELGCFVRFISSGDIVSITENRGNQFDQLSYEGLAYPQYADWRKKASKFVSLWQITKKNKKKEIVTVEAKEKFDAICKYQPRLYKFNKEYAYLLRDIVRGKSLVELQQIRQEIFRFIEQDCGVTRLGSLSLSTLETVKAVKGIIYSYFSTALNASKNNPISDEQRKEFDPELFALLEKLELIRTRKKKQKVERIANSLIQTCLENNIKFIRGEGDLSTTNNATKKKANSRSMDWLARGVFNKIRQLAPMHNITLFGCGSLYTSHQDPLVHRNPDKAMKCRWAAIPVKDIGDWVLRKLSQNLRAKNRGTGEYYHQGVKEFLSHYELQDLEEELLKWRSDRKSNIPCWVLQNRLAEKLGNKEAVVYIPVRGGRIYFATHKVATGAVSIVFDQKQVWVCNADHVAAANIALTGKGIGEQSSDEENPDGSRIKLQLTS

SEQ ID NO: 451 - protein, 1054 aa, synthetic construct
MSSAIKSYKSVLRPNERKNQLLKSTIQCLEDGSAFFFKMLQGLFGGITPEIVRFSTEQEKQQQDIALWCAVNWFRPVSQDSLTHTIASDNLVEKFEEYYGGTASDAIKQYFSASIGESYYWNDCRQQYYDLCRELGVEVSDLTHDLEILCREKCLAVATESNQNNSIISVLFGTGEKEDRSVKLRITKKILEAISNLKEIPKNVAPIQEIILNVAKATKETFRQVYAGNLGAPSTLEKFIAKDGQKEFDLKKLQTDLKKVIRGKSKERDWCCQEELRSYVEQNTIQYDLWAWGEMFNKAHTALKIKSTRNYNFAKQRLEQFKEIQSLNNLLVVKKLNDFFDSEFFSGEETYTICVHHLGGKDLSKLYKAWEDDPADPENAIVVLCDDLKNNFKKEPIRNILRYIFTIRQECSAQDILAAAKYNQQLDRYKSQKANPSVLGNQGFTWTNAVILPEKAQRNDRPNSLDLRIWLYLKLRHPDGRWKKHHIPFYDTRFFQEIYAAGNSPVDTCQFRTPRFGYHLPKLTDQTAIRVNKKHVKAAKTEARIRLAIQQGTLPVSNLKITEISATINSKGQVRIPVKFRVGRQKGTLQIGDRFCGYDQNQTASHAYSLWEVVKEGQYHKELGCFVRFISSGDIVSITENRGNQFDQLSYEGLAYPQYADWRKKASKFVSLWQITKKNKKKEIVTVEAKEKFDAICKYQPRLYKFNKEYAYLLRDIVRGKSLVELQQIRQEIFRFIEQDCGVTRLGSLSLSTLETVKAVKGIIYSYFSTALNASKNNPISDEQRKEFDPELFALLEKLELIRTRKKKQKVERIANSLIQTCLENNIKFIRGEGDLSTTNNATKKKANSRSMDWLARGVFNKIRQLAPMHNITLFGCGSLYTSHQDPLVHRNPDKAMKCRWAAIPVKDIGDWVLRKLSQNLRAKNRGTGEYYHQGVKEFLSHYELQDLEEELLKWRSDRKSNIPCWVLQNRLAEKLGNKEAVVYIPVRGGRIYFATHKVATGAVSIVFDQKQVWVCNADHVAAANIALTGKGIGEQSSDEENPDGGRIKLQLTS

SEQ ID NO: 452 - protein, 1054 aa, synthetic construct
MSSAIKSYKSVLRPNERKNQLLKSTIQCLEDGSAFFFKMLQGLFGGITPEIVRFSTEQEKQQQDIALWCAVNWFRPVSQDSLTHTIASDNLVEKFEEYYGGTASDAIKQYFSASIGESYYWNDCRQQYYDLCRELGVEVSDLTHDLEILCREKCLAVATESNQNNSIISVLFGTGEKEDRSVKLRITKKILEAISNLKEIPKNVAPIQEIILNVAKATKETFRQVYAGNLGAPSTLEKFIAKDGQKEFDLKKLQTDLKKVIRGKSKERDWCCQEELRSYVEQNTIQYDLWAWGEMFNKAHTALKIKSTRNYNFAKQRLEQFKEIQSLNNLLVVKKLNDFFDSEFFSGEETYTICVHHLGGKDLSKLYKAWEDDPADPENAIVVLCDDLKNNFKKEPIRNILRYIFTIRQECSAQDILAAAKYNQQLDRYKSQKANPSVLGNQGFTWTNAVILPEKAQRNDRPNSLDLRIWLYLKLRHPDGRWKKHHIPFYDTRFFQEIYAAGNSPVDTCQFRTPRFGYHLPKLTDQTAIRVNKKHVKAAKTEARIRLAIQQGTLPVSNLKITEISATINSKGQVRIPVKFRVGRQKGTLQIGDRFCGYDQNQTASHAYSLWEVVKEGQYHKELRCRVRFISSGDIVSITENRGNQFDQLSYEGLAYPQYADWRKKASKFVSLWQITKKNKKKEIVTVEAKEKFDAICKYQPRLYKFNKEYAYLLRDIVRGKSLVELQQIRQEIFRFIEQDCGVTRLGSLSLSTLETVKAVKGIIYSYFSTALNASKNNPISDEQRKEFDPELFALLEKLELIRTRKKKQKVERIANSLIQTCLENNIKFIRGEGDLSTTNNATKKKANSRSMDWLARGVFNKIRQLAPMHNITLFGCGSLYTSHQDPLVHRNPDKAMKCRWAAIPVKDIGDWVLRKLSQNLRAKNRGTGEYYHQGVKEFLSHYELQDLEEELLKWRSDRKSNIPCWVLQNRLAEKLGNKEAVVYIPVRGGRIYFATHKVATGAVSIVFDQKQVWVCNADHVAAANIALTGKGIGRQSSDEENPDGGRIKLQLTS

SEQ ID NO: 453 - protein, 1054 aa, synthetic construct
MSSAIKSYKSVLRPNERKNQLLKSTIQCLEDGSAFFFKMLQGLFGGITPEIVRFSTEQEKQQQDIALWCAVNWFRPVSQDSLTHTIASDNLVEKFEEYYGGTASDAIKQYFSASIGESYYWNDCRQQYYDLCRELGVEVSDLTHDLEILCREKCLAVATESNQNNSIISVLFGTGEKEDRSVKLRITKKILEAISNLKEIPKNVAPIQEIILNVAKATKETFRQVYAGNLGAPSTLEKFIAKDGQKEFDLKKLQTDLKKVIRGKSKERDWCCQEELRSYVEQNTIQYDLWAWGEMFNKAHTALKIKSTRNYNFAKQRLEQFKEIQSLNNLLVVKKLNDFFDSEFFSGEETYTICVHHLGGKDLSKLYKAWEDDPADPENAIVVLCDDLKNNFKKEPIRNILRYIFTIRQECSAQDILAAAKYNQQLDRYKSQKANPSVLGNQGFTWTNAVILPEKAQRNDRPNSLDLRIWLYLKLRHPDGRWKKHHIPFYDTRFFQEIYAAGNSPVDTCQFRTPRFGYHLPKLTDQTAIRVNKKHVKAAKTEARIRLAIQQGTLPVSNLKITEISATINSKGQVRIPVKFRVGRQKGTLQIGDRFCGYDQNQTASHAYSLWEVVKEGQYHKELRCRVRFISSGDIVSITENRGNQFDQLSYEGLAYPQYADWRKKASKFVSLWQITKKNKKKEIVTVEAKEKFDAICKYQPRLYKFNKEYAYLLRDIVRGKSLVELQQIRQEIFRFIEQDCGVTRLGSLSLSTLETVKAVKGIIYSYFSTALNASKNNPISDEQRKEFDPELFALLEKLELIRTRKKKQKVERIANSLIQTCLENNIKFIRGEGDLSTTNNATKKKANSRSMDWLARGVFNKIRQLATMHNITLFGCGSLYTSHQDPLVHRNPDKAMKCRWAAIPVKDIGDWVLRKLSQNLRAKNRGTGEYYHQGVKEFLSHYELQDLEEELLKWRSDRKSNIPCWVLQNRLAEKLGNKEAVVYIPVRGGRIYFATHKVATGAVSIVFDQKQVWVCNADHVAAANIALTGKGIGRQSSDEENPDGGRIKLQLTS

SEQ ID NO: 454 - DNA, 32767 bp, Homo sapiens
  source 1..32767: mol_type = unassigned DNA
agtcttctctctcgctctctccgctgctgtagccggaccctttgccttcgccactgctcagcgtctgcacatccctacaatggctaaaacagcaatgggtaaggcactgcgcctcgttctccgtcggctctacctggagcccacctctcacctcctctcttgagctctagaagcattcagagatattttataaagaaaaagatgttaatggtaacacaggaccaggaaggacagggcagttctgggggaggtgggagggcagagaagaggtctatggaaatctaaagcgaagaatttcttttaaaaggtagaagcgggtaagttgccctcctatgggtagagaatttattctgtttccatatttaaaattaggactcaatcgtgaggggaggaagctaccttaactgtttgccttaaatgggcttaagggacattttggaaagtgctttataacgaccttttttttttttatttcttctctagtttaagaagaaaataggaaaggggtaaagggaaggtgggagaaaggaaaaagaaaattgcaaagtcaaagcggtcccatcccgctgtttgaaagatgggtggagacggggggaggggatggagagaactgggcacattttacggtattgtctcgtcgaagaaaccgctagtcctggggtgcggtgcagggaggtaagacggcgggggacagggtgggggtaggacctccgctcctttgttttagggcaagggaggggaaggagagaggaagtcgcggagggcgtggagggcgcgggtgggcagctgcaggggcggggaagcgcgcggcagggaggggtggagggacagcggcttcgaaggcgctggggtggggtttctttgtgtgcggaccagcggtcccggggggaggcacctgcagcgctgggcgcacaatgcggacagccccacccagtgcggaaccgcgcagccccgcccccccgcccggtgctgcatcttcattcgaaagggggtcgggtggggagcgcagcgtgacacccaggagcccaaccctgcggggacagcggcgccacgccccgcgctccccgctcccgactccccgccgcggcttccaagagagacctgaccactgaccccgccctccccacgctggcctcattgttctgcttttaagagagatgggaaaagtgggttaacatttttcttttcggaagcaaattacatagagtgtttagacatagacacagataaagggttctttgaagacctttgatcgtttgcgggaaaagcttctagaacctagacatgtgtatgtataataatagagatgacatgaaatcgtatataaagcaaaagaggtcaaagtcttaagttaagccacgcgaaatttccgttttgtgggtcagacagtgccaaatatcggcaatttcataagctcagagagacaagacagtggagacacaggatgaccggaaaagattctggattcagggccttcatccgcaattggtcttgtgccttgagtgcccacggttctggcgctcagtggccccggggtgaaaaggcagggtggggcctggggtcctgtggcagctggaagcacgtgtcccccgggacttggttgcaggatgcggagacagggaaagctgccgaaaggactccatctgcgcggctccgccctgccctaccctccccgcggagccggggagacctcaggctccgagactggcggggaagaggaatatgggaggggcagttgagctgtatgcagtcctggaacctcttttttcagccccgcagtccacaacggcccgagcaccccttgatgtgcgcagacccccggcgtggctctcagccccagcaccgagcccctcccagccaagcgggtggctctgcagaaaagctggctcgagccccgcccggccacacaaaggcgcggccccacccagcccgggcgcgagaccgcagaggtgacccccttcccagggattcagggagggctgtctcttctcgcccacccacggtccgcggagctcggggctttttttcccccagcccaagccccccgcccaccctctgttctctatgattttccagaatggagaccccgcgaggggcttctctaagggagaccctcgctcctccagcggggcgcggctcggccccacccctcccagctgaggcccagagccgcctaccgctggccgggtgggggcgcacgtggcgactgggtgtgtggagcgcagccagccctgcagagccccgcgccgcgccctgcgctcccctccccggagttgggcgctcgcccccgcggtgcagccggggagaccggtttctgcgcagtgtcctgagctacccccgctttccacaattcgcagttcactcgcacgtccagaaaggttctgagaatgggtggtgggggcgatctcgcctcgctttctgcacccctcagaaaggtttccgctgcaggctagtggctgcaaactcatcgtcatcatcagtattattatcatttcaaatcgttgttattatttaatgattcagtagccttgtttgttctcatttgttcaaaagggacgtggattgctcttggttaaggattaacccttgttgcgttcgctttgcttcctcctaattgccctcatccctttcccccacaaaaaggtaaatttgtctccagttgttcattttaagttataaagcaaatatatttttgcttcctgccaggattatgtatgttcatgtggctaagatacatgtgcaagtgcttgctaagagcagggtttgtgtgccaacgattgctggaaaattctctgcaaagaattgtttgtggctgcaatgggtgagaatacacatatataattgagatgatcttcaacataaggttatatctataaatatataaatatagtttatgcacaaaattttaagttttttcccctgaaactgttcttccaactgctgattcttgatacagcctcaatcctacacagatacatggatcgtgaaatggtagccgccatccaaataaaaatcccaccccaaatatgacaaacgcaagcatcctttctggccataatttaactgcatttgcaaatcatgaaaaaaacactacttctgcagtattaaaataatagattttgaaattaattccaatttcaaagataattaattatcagggcgagtgcttttttcctgattcattaaacaattatgtattcagcatgattgtaagaggtgcatataatattccccattatcttttctaatgaagtgggcaccttctgaatggatatataagtaactagaaatgaaaagctgaggatttggtcagaatttcaggataaaactgaaagaaatggcagtagtttatcaattaatctcatgtatttagtttataccaggtgagtaagctgagcctgcaataaacactctctgtcccagtgtaacacgtcgcaggtagctagaatgataggataaattaatagaccttgtggtgtttgtctatgcacgttaaaattctctgagagaaagtatattttaaaatgataattaagattggacatttgtgctattaaaatctacaactttagtcaaaattcacaatggtttttttttacaataatgtgacttacagatttgtagtaaattattctattctaaaagagaaatgagtgtttttattgttacagctattacctcattaatatttttagcaaacttttatttgttgcattgaaagcagttttaattactttgggtttttatttttcaaattactaatggatagatggtggaataagcatttaatcatttggcacaatatgacttccatcaaatagctcattctcagtgattaaaaaatgctacaagaggctacaatttactcagattcaggaaatgtcctttcagagtgccataaggctgattcatataataaaatagttttcttccctataatttaagatcaaatagttacttagttctgtgaatacctagcagtagctatcaaacagaattttaaagttaaatctgtacaactaacaatgaagtggaggatgaatcgatacatattgaatggaagactttgtcattgataaattcaggccatctttaggaaaattccggatttatcaatcaccattattttttacttcaactgagtgtgactgatcacatgctcaggctaccttggtagctcattgctcacaggaggctgaaaaaagctggcctccgagcaggaggaagctcagagcacaaacctaggcctgggcgtggccactgggagctgctgatagcgaaccccagctcacaccagtttcttttttggtcgtgggaagaaaaacacatattatcctgttgtcacaagatctgtgaccttatatgaaaaaatgctagaattttttcattaaaaaagaaaatactgaactagccagtgacccagatgttttcagaacctagactggttctgtccattggaaaacctcggtgtctgcattaacttttcaccacactagagggcaatcatgttctctaaaaaagcagatgattgatgtaaacctagttccaaatattaactgtttaataaaatcttttcttttaccaggaacattcaagtgtttattcaataagctgatgccatgctttaccctagtggatgaacagagcttgtacaattttcaaggagacaggatgaaatgagtggtcataatctgaaagtagatacacgccctggttaattattccctgatggttttacttctcagttttattacattgttattataataccatttatgttacttctgagattttgtagtggataaatagtagaaaaatgtcagtagtaatagcaaagttatttagcagccgaatattttaatgcttaaaaataaaggaataaattaaagaaaatcattgtttacttcttcatcgattgaaatgtgccccctgttcagagcacatctgaatatcagagtctccacctgcagagaacatgcagcttagcgagtaaaacaggcaggtatgtgatactgaggaggtgtaccaaaaactgactgctgttatttttcccatcttctaagtctgtctttcttttccatttaaagatacctttttaaatctaatccaatgtgatttcaatctagttttatcagatttcaacaattattgagcatctccttgtagtggttttctgtttattagaaaatcgatgttaattttaacgaagtaagaagaaatatataagtataaactaattttgggtatcatcaaaagtggattttttaaatatgcattgatagaattattttttgattacattttatgtaattctaatccagctataaaatatttaatagtgtcatattactgtgttcctcaaactttgatgtgcatatgaattacctttgattttcattaaaatgcaaattctgattcaatacatctggcttgaggcagacattctgtcttccgaacaagctcccagatgatgctgattctgaccactaaacacatcagttttagggatattaacttgtaatatacaggtatccctcctggtaagctctggtattatgtcttaacatttttaaatctatggtaatctttacaaaatattttacttccgaactcatatacctggggattttattactctgggaattatgtgttctgccccatcactctctcttaattggatttttaaaattatattcatattgcaggactcggcagaagaccttcgagagaaaggtagaaaataagaatttggctctctgtgtgagcatgtgtgcgtgtgtgcgagagagagagacagacagcctgcctaagaagaaatgaatgtgaatgcggcttgtggcacagttgacaaggatgataaatcaataatgcaagcttactatcatttatgaatagcaatactgaagaaattaaaacaaaagattgctgtctcaatatatcttatatttattatttaccaaattattctaagagtatttcttcctgaataccatgtgagaaaattcttaagaatttattgagtatgactgtatatttgaaaagagtgttttcttctgcttatctaagccaataaaggatcttcattattcaattctaactttctaaggaagtcaacctacagatcagaaagaggatcttcaaggaatagcatcaaagacatagtcaggtctcccatgcagtgactggctgaccatgcagccattaccacctttctggaaatattatgctgcaaaaatgatacaatacacgaaatatctcaaattaaaaaatataacatttcccaaatagggcactaaaaacatgatcccaaataaaactagcttcagggtttgcagaatatactgttactcaacacaaagttggactaagtctcaaagttagccattcagttgttgttaacagttcatttcagggtctctcagaagctgggaaactttccatttttgcaatttcttgtacattgaaggaaaggaagacacacttaagacagcattacaaaagtaattcatgttttaaatgtttaattctggcagtcgggcagggctctctgtataacctcatttggagatgacaaaaatctaaacttgagggcctcgagccaataagtcttcctatttctttactcaaacattttcccgcaatggtgctttctttcaactgtttttctggtgtattcataaattccagattctctatgggaagtaacttttattgattgatttaacccttgtatagcacatataacatgcaaggcattgttctaagaactttccacatattaactgtgttaatcacttaataatcctaagtaggttctattacagatatggaaactgaggcacagaaagttgaagtatcttactcaaggtcacacagttagtcagatccagaatttgggcccaggccatctggcttcggaatccatctttcaccgattgctgctagtctcatatctgttccatgttagaggtgagctcccattgcagaggtcacacctgtgatatcaccattttatttaaacagaccagagatggtcttctcctttctgatcacagactcaccttgaagagaaaatacttccaaattgatgcctagttttaatagcttacctggggcttattcaaataattgccatgatttaggctttgggagaaagagagctatgaggccgtgtgggttgtaacgtatgagacacatggcgttctgcaggctcagcacagcatcgatttctggtgggaacacactctgatgaccagttccagaaataacattgacttaatctcctcagtcccatcatggttagcacatttcaaaatgcctccttaactacttccataggccagagatatttagttttaacattttgttgaataaaataaatttacacattcacatttaatataactattagatgttatttcaagattctcttcatattaccatcaaagcaggcaggcaggcaggagagaactgtaggaaggttttgaatcccttgtgaaacatttttaattatcttttaataaaggaatcaggccctgtcatttgtcaaggagacatttgcagtagtaaagcttgtgtttataatatccatttttattagtcatgattaaagataacatttgtgtacatttgttctcacaaaacacttttatatgagtgtaaaggttaattaatgcatttcagccatcattttgctggtcatgtggaaatatagcttctttaggaattgtacttagagtaggagccacatattatactataaaaccataacaaaaatattttaagtttgttctcacttgttgttgacctccagagtaaaatatttaatactctggaaagttatgggtttcaaaatttattttatggcaagaaatagataattacagttctcatagagcacatttaaaataatttatttttatagggcaaaaatattgcctaggactgaatgatttttttttttttacaaagattgtaaagcaacgcctgcaagagtgcccatttagcagttattcttctggaataattgtattttggatgttggagttcgcacattaaccattagtacaagtacccaatataacaatagatcatcaggataataaatctgtccatcttttagttgtatgtctttatatcaggataaagagaattgagtgaaatttatctaaacctagtcccacaaatacttttacaagagagcatgttaaagtgtaaattaaatttttattagcattctactctgtctttggaagttttttttccttatgaaatgcagccataaagtttaacttccattaacaaagctgctcacagtaaacctattataataatagtttcccagtttgggcttcctagtgaggagcaacctaactcacacgaaacaaccccaacttataatatattgactgttacaaaactgagaccagaaaatcccatcaagatggtactgttatcatttccagactctcgggaagaacattaatcatctcaggcacttttaggatagacttattgcagcctccctgggaactctgcttcagaacataattatttttattaatgcagagttactttttatttccaacaaaaatatctattgttattatttaagtcttacagctttatctgagaaattccaattagcacccttctcataataaatattcaaacacatgaaaaattaccaaagttgttctagtcttttaatgacatattacatgatcctgcactcttgtcactttaaaaattatctttttattatatttctgatgatttttttcttatatagttttttaaaaggagcaggcaagcatagaagactaaaaaatgttcaaaagaaaaattaaatcgcatgatctatctatatgggaccttgtcatttttagaaaacattcacctgcttcatccttttgaatcttcatataatccctctgagatgggcatactatacaagttgtcttatttaaagattggtaaatttaagctcaaataatttattcagtggcaagcctcagaggcagactcggaacacaggtctaatatatattatatatatattataacatataatatatatattacatataataaagttgtgtatattatttacctatcaaaatatttatatgtaatatataaatatgttatatatcatgtatgtgcctatttcatacatatatacacattcatgcaaaataaggtttagcactccctccactgtcctgtaataaaacatgcacagtgagaatagtcatacacgaggcatatttgtcttcagtttaaagtcattgatagtcagtgtcactaactaaagtaaaatagattggagcaccaactttgttctgaagcctgtgccaggtattatgagaacaaaaataaaaatgttcctcacccttggtggatttagtcttttgcagaaaaaaagatcctgtacatgtcagaaagttcaatagtaataatggtaatttataactataaatggaagtcaccatctcacaatttcaccatcttaacaattttgttaaactgccctacaatattacaagatagtacataatgatacactagtaacatcaactaggaagtaccaagatccaccaaaaggctgaaaaatttaaatatttaatgagtccatcaaccaatctggccagagaattctttaattaaaatgcttcccaaattttactgagaatcagcagcgtttgaggagctagcctccacccccagaggttctcactctattaggtctgaagcaggtcccatggatttgcatttctaacaagctcccaggtggtgctgatgaggctgattcagaaccacacttggagtagacctaaaacagcagtgacctgtagggtccccaagcagcaggccaggacagcatgtgagttacgtcctctgtggagctctgcaacaaggcgtcaagaggtcagagtctaagtccccatcagctctgcccttctccaccagtgctgctggtgctgcatggaaggaagagcccagaagggattctgagtttcagtctttactcttgctgacgcaccttggtcaggtcaattttcctgtttgttcctctaattcagcatctgtaaaatagccatgtgaactgccttgtccatatcagagggtctttttcagactcaaggaaaaaaacgtgaaagtgattagtgtctgtcaagtagtatataaatgcaagaagttgagtttttaaattgtcattagatataaatacccatgtgcatgcatttagaatgagtaaagagggaacaaggagcgcaatcaaaaactgcgtcatttgctttttgaaaaatactttctatgtaatgaaaagtgaaataaaatgttaattgagtccctctgacaacagcatcagacgttttgcagttcttgtgattagaacccacctggccagcccttcttcctcctaaagaagagccttcttcttcttaaatgaaggttggctcagaagaagcaattaactcattcaacgttttgttacagtcaatccacatccaacttttccccaactcaatctgctttaagggaaggatggtaagtggtggcccaagatggcaaccatcaagcttagagaatctctagaagcaggggtgtccccagcaagtagacactgaaaatatgagagggctgataagccagagataaaactcagtacttactttgcttctagtccatgtctacccctttcttggcaccaccttgacactaccctctgagtccaccttcctgagatggtacaaactctgcttagacaaagcagcccatgtccaaaggtgttagggctcagtttaaagctgccttcaaaagttaaaacagaagtgtaaagttctgtgcaattaaaaataatcagcttgtcttggaactcaaacgaatgtaaaatcctatgaaaattaaaaagcagtaccacaagttaccccaaaagtccttaggtcagtaactgttcctgttacaggtaagagagagcatggattagaggtgggcgtgggtatccagtggacatggttttgaaccatgctccactactactcactatctgagaattcttaaatttattaatcatttctatattataattttctcagttatgaaatgggaaaacaatacctaaatcacatggttgttaagtaagcaattgattgttaagcatttggtcatcaaaaatattaatccccttccctgattccctagataaatgatgaaaatactaaataaaaataataaaaatttaaagtgaacatctcaattcttatactttgttaatttctacatgtattacaaatctactagaaattacttggaattgaggaaatgattactgcttaataattctttgtggtagagggagagttggtatcatatttatgagacagcagccaatatagtatatctcaaaggaaaaaatccattctacataatgccagaatttaatagttaagcattttatctaggtcacagcacaataagcaagatggataattaaaataaaagtatatttctcttgcatatatttctcatttcatgtttccctatcatattttatatcttaccttacttcaaatacatatataccttcaataaaactgagccttcttgcttacccaggaagtttcatcattcagtagaaataaaagatgactttagaaatattaaaatacaaaaatctacactgaggtcttttgaatgcaggaaaaagaattatatcacacacacacgtacacgcacgcatgcatacacacacacagaacctctcgttctttcttaacatcttatcaatccatcagtttcactcccactccgtatcacctgactgtgcacaatatctcattgccacctcccagtcttctccctgcctggcaccctcctgctctcctgcttccactttaaacacccttccttcagctaggtcttttctttcagggatcctcccgttgctttcttatctggatcaatttagccttcctcttctccacccattagtggataagcacgacaaagacactagagtcaaataatacaaacagaatataccttagatgagtatggtgatgaaaaggatatggatacttagagtttagcactattctctcagccactcaggaaagcaacgcctttacaatcaatagtgtttcaggtaccaatcaataatctgttattgctatttttaaaatctataaggtatcagtaaaatgtaattactagagcaacaaagatatcttgtgaaatcaaattagtattcatccagcaactgagtacaaaggtttaagggaggataactaccaataccaaaacattttaagcattttgttttgcctcctaaatatcaaatcatgtaaatgtgtggtacataaattaggaattatatttatgacatagctgcagacatattaagagaaatatgtgcttatatttacaagtatagtacagttctttttcatattagatactgttgatgataatctgcatataaaaatgctcaatattttttcacatttataagccataaaatacagctaataaaatgtgtttctactttctcataaacatggaatagtgacaaacaaggagctttatatgaaagcaccattacaatttaaactctcacaaggtcataatatattgcactaagcaggagagttcagcttatttaaaaaaaaaaataaactctaatgaggttctggaatgcagagccaaagcataaagatggaaataaaagaattgcatgtcttctgaactgacttggttgatgatttttttaaaaaaggttttgtgtcttctgacttggttgatgattttttaaaaaaacgttttgtggtagaacaaataaggtaaatgaaattcagtatttaggatgaaaagtttttctaatttcaggaacaacattgaagaaatattgaactaagcagctttgaaagaatcagattccatttgttgaaatttttctgagaatgaatttttttaagacagtgtacacagttgcagtgtgtattggttatggattgtggcaagctatattacaacttacccaagaaataaggaggctgggcgtggtggctcacacctgtaatcccagcactttgggtggccgaggcgggcggatcacgaggtcaggagatcgagaccatcctggctaacacggtgaaaccccgtctctactaaaagtacaaaaaattagccgggtgtggtggcgggtgcctgtagtcccagctactcgggaggctgaggcaggagaatggcgtgaatccgggagggggagtttgcagtgagccgagattgtaccactgcactccagcctgggcgacagagcgagactccgtctcaaaaaaaaaaaaaaaaaaaaaaaaagaaagaaagaaagaaggaaaaaagtcacttgaaaagaatactggactttgtgtccagcttgcatagctgaaaagaataaaaacctgtccacttaaactcattgcaaaaagaagatgtcactcctacaaatagcaaagagtcatgaaattattctatccagaaaagtatacatttcatccctttggataaattttagaagtgaactatgaatacatacggtgaggatagccagctaagaagtcaagaaggatttctcaaatttgctgctcagaaagatcatactctccacaaaacaaataatagcaggctttccaagtcaaccttgaatccagctttcctttatctttccttcttgtgaactttcactagtttactatctaacaatgaatttgacgatagccacataccatcttatagcaatatttgttatcatatcccttgttatttatcattcacctgctctgcttgagccagctacaagtcacatgtcccacgcactttttcctgtttgattttttacagcactttgagacatgtctcattattcctacttgacaggaaagaagccatggaaagttgagtgacttgctcctgatcacaaatgctggccaaggaagagtcgagtttcaaatctaatgatctttccactgcactctagattcctcattttgaactatttttttattttttgcactatagacttttttccacattttgaactgttttttattttttgcactatagacttttctcttatacccaactatattgatgacttcttttaggctagaaacttgtttcacttactttccctttcttcagattgctgcaatattggccaacatgtattgggtacttactgagtcaagtactgtgattgtgccaagtatcttataggaggattatcatcctcatttttacaggtgagaaaggaaaggaggtaaagtcacacacagccaacaaaaatggtagcaccaggatttgaaacaaatcagtctgacccaagttgactttgttaaccactgtatgcacagtcttcttagacatagtaagagctctaattgtgtttggtgatttgattattatgacaaagtaagtaagggaagcagggagaattataagaaataaggctccacaacacttggctatagcaaagccccttaaaacttcaaaaggtcacccaaagaataaagatcaggctgggagcagtggctcacgcctgtaatcccagcactttgggaggccgaggtgggtggatcacctgagttcaggagttcgagaccagcctggacaacatggtgaaaccctgtctctactaaaaatacaaaaattagctggatgtggtggttgccgcctgtaatcccagctacttgggaggctgaggcagggagaatcgcttgaacccaggaggtggaggttgcagtgagccgagatcatgccactgcactccagcctgggcaacaagagcaaaaaactctgactcaaaaaaataaataaatcaatcaataaaataaagatcaatttggagaaattaatgcttattaataagcaatgtcttgcacagcacttcagtttctcaatacattacctaactcaatccttacaacaacaccctatccccattttgtggataaataaactcatgttcagaaggttgaataaattatctaaggttaatagttcctgacctagagctcaaatcttcagtttctatcatattcttgcccttaccctggggtagctaacattcactcactagtattggagctaaaataagggagagaacatataaatgaatacaaaggagacattcacctgccttctctttctccttacatagagaaggttgattatctgctattgtgaagtttgccttttgaaggatagaaatgagaagactttcttaaattttgcctctacgccaagaaattagagtggtaccaccagtagttccattttcaaactatcactgtagctaaagctatgtggtaagggccaaggaaaagaagtattcttgcacttcaaaatgcactgaaataccagtcagtagcataatataaaggaatttagtggagagaagagttgacctcaatctggctccaacatctcggctcttaacccctaccctacacttgttcttcatggggaagctaattgggccactggaagattcagcagctaccatttgcagctgagggacagcccctccctgcttagcaaccaatggatatgcatttatggaacacctgctaactgcgacacacactcctatgtatgagggaaaatacaaaaaatgttaaaggagatgccttcccttgccctcaggaaacttaagtatagttgcaaagaaatgattagcagcaaacgaaaccatggagaagtaagggctaaggtctgtgaaacaagcctagaaaataaccttgtccttgaaaaacacaaaaagaaagaaagaaagaaaagaaactccaaggcccttgtgaaggaaaccattaagtttgcttcacttctgtgtttaggaagacacaaacccagtcttaatgaacctcaaggccacaactactggagacatttaggaattgtcaccacattctaatgtatatatcctctgtttggcccttcctattaatattttgtaaaatttttgaagatatgagcaatgtttaaaaccatgaatccccctttttttataagtaatatttaggctgaataaacaagagaaaataggacataaaggggagccaacgtgtgccttcatttataatgtattcccaagttgtgagtttggtttatcagcaatttatcatgccaaattccaagtcatatttatctatgcagatcaaacacttgattctatttttgccttaatttttttattgggtatgtttatgaccaagtcatatggtattttctgtgacagataaaatgcacaggttattccaatctggctcagccagtcatagcaacatgtagtccttctcatgtcttaagaatgagtatcaagaattcaaagggagttccagatggcatccaaaaagcttacagtttatgcatcacttattctaacagtagaaaaagaatatttgaagccaaaaatagaccttgcatgtagcatgtggaagagtagaaattgccctgatagttaaacaatttgaaattcaagacattaatttctttatgaagcatttgtcacatcataggtaatattttatgcctatcatatatatacttattatgaaatacaaagaaattattcattctatctaagactttgtatcctttaccaatatctctccattctcccacctccaccctagcccctggaaaccacccttctactctctgcttctatgagttcttttttagtgagatcatgcagtatttgtctttctgttcctgtcttatttcacttgacataatgtccttcaggcttatccatgttgtcacaaatgacagaatttccttcttaaggctgaatagtattccattgtgtgtatgtagcacattttctttattaattcatttgttgatggatactcatattgattccatatcttgggtcttgtgaataatgatgcagtgaacataggagtgcagatatctttttgacatactgattccactttgatgggatatatacccagtagtgggactgctggatcatctagtagttttatttttttttattttttattttttttattttgagacagagccttgctatgtcgcccaggctggagtacagtggtgccatctaggctcactgcaatctctgcctcctgggttcaagcaattttcctgcctcagcctcctgagtagctgggattacaggcacgcaccaccatgcccggctaatttttgtatgtttagtagagacggggtttcaccatgtctcgaactcctgtcttcaagtgatccgtccacctcagactcccaaagtgctgcgattacaggtgtgagccaccacgcctggcctagtagttctgtttttaattttttgaggagcctccatactgctttccataatggctctaggaatttacattccaccagcagtgcacaaggattgcttttctccacattctggctaaccagtctcctgtctttttgagaacagacatttcaacacgtgtgagataatatctcattgtggttttgatttgcatttccctgatgattagtgatcttgtgccttttttcatataactgctggacattaatatgccttcctttgagaactgtgtatacaggagaaaataatcacttctcagaggagctttcatttcaaaatatccgggaaaaaaatagaaaaaatggaaaatttatcctagagtaagttgtcttttatattttgaccctgtttgtgacataaactggatgatacaaaactggaatgcaaaggctttaggaggattacttacttacttgtatattgctttaggttgtttgcagaaaattatactaattgaagttcaggctatgatgtgataaaatctatgtcaggagatgagtctacatgcaaagtttgaggaagtgacatttgagtttcaaaacaaaaaagcaattttcaatgtcatatctaggttaacccaaaagatttctttcaccctatttagctgcctctaagatggatgctgaggataattacactgtagaacaataggacgatgcttcacactcacctcacaggctctgttattcccacatactgccagagatactccaaaataaaatcactgcaacatcaggcagttataaacctcaacggtattattttctatttatatacagtatattttatattttacaagtataaaatagaatatatttattctattctctttgacacaaagtgaccataagacatattacttaagtatgactagcaaagtcatggggcttgtcattcaggaggaaactcttaactaactgttcagtttttgttcactgcaccatttacataagccaaactaatgcttcacactgtgcaaaacaatgcacagtgttgtgaatgaatggctaaaataaaactctaatgagtggggtttgaaaaatgcaactttagaaaactgttgagaaaatgttgcacactgcgcattttacaaaatttcgttgaaggacactggatattctttttaggattatggagggaagcaaaattttggctcctacatgcagtttttgtggcctttgcctgaaatagtcatctcccattaattatttagatatcattcatttcctaagacaacatttagggagactgccttaagtacaatttgtacactacccagataagaattctttttggtgaaacatcgataaatattacttggcagtaacaccaagttaaaatatttgtttcacagtcgacgttaataactattatagataaagtgaattttataagacatactcagatctaaaacagcaatatggagctcttcaaatccattgaaacttcataccagcctacggaagtagaggtttttatgcaaactcttcaagaaatatgctctgaacttttaattccttagattgatagaggaattaaatcatgatataactaataggtttgtggtacaaattgctgctgcttaatctgactctgtgtcttcccagtgttctatatgaattagatattccattatctaaagacaatcaaccccatcccacggtgatagctctaggactccctttgagttcattaaatctgtattctcagtctccaaacttctggttaattcaaacagaaaagtcaactggcccatgaactaaaataaagtcatctgaattttttttttattttgcagtgtgataaaagtctcgcactttttatttctgaaagtttctgctttcactgagagcataataggctatccacccttatgcaatcttacatacaaagtcatagtcaggctaaattcaaaaacacatgtgagatagaagtcaacgtttattttctggagaaaagccacacattacaacaaagtgaacaatgaagctggcatccttatcactggtgaccaaaacatttgtgactctggacattggccccacaaatgcgataaacattctgcataggaagtgagttttgctaattaaaaatggatccaaaatactttctactcttcagccaagaattaaaaagtaatagggaggaattgaaatcacttgggtgctacattgagccattctggagaagcaattcagagaatgtcatggcagcctcaaattgctgctcaggagcatcccagcttagaagattgcaggaaaggaagagcaaagtcattcttacatgagaactgtccttaaccagatgaatagactctccattttttaccctggctttgtctcatttaagtcccaaccaatctagctatcattttaggttttactacctgctagtatttaggagcttagggggataaaaaaatccctcaatactcagaattagacttggtgataaaaatcttgacacataaacagaataaagcgctttcattactcctctaaaccacagtgtcatttggtctctatcaaggactgtaagaatttctttcatcaggggaaagaaaaaaaggacaagagcctgcaagatgtagcggaactctcattaaacacagcaggagctttaactggaatccagagtaaggtgaggtaccaggttacaacaatttactgcttttattacaattttgatcacaaggactgattcatgtcatctagtttcttttccttgtcactatcactggtgctaagaatacatcaaattgaaatttaagagcctcatatgtttctgtataacccagtgatgggttgtactgctttgaccttcttaaatgtccctttatttcatttgatatccattcccatagaaaaactataatgctttggttggtcaaaatattaatctttcaaaacctccctggcttagaaaaccaaatttttgtagagagagatgggtagaatctaattttattctaaagcaattagcattacatcatcacagcagaaatatctagaatattacctcatgtcagtgatcttctgatatgttaaaaagggtattttaaaatctgagttatttctttttctttttaaagttacatcattaattacatactcatcaaccaaaatattttatgctccaaatttgaaccgatatagtatgtaagaagtgttcaaaatgaaattattttggtctattttgtctttgaagaagatcacagggatggacctcccaaaaggatttttaaatgggattacatatctgacttttaaaaaaaattatctgaccttgagttatagtgccccaaagtaagcaaagttccaaacacacagtatcatcagaattgagttaaaattatcaccaggggcttaatttctgaaattaaaaaggaaatgttatttccttatgaaaagaaaaggaaccaaaaatgaacttcaaggtagctgatttctgtctatgttaagacttaggtaatgggagaaagggaaaaggaaggacagaattaggagaggagcagtgtttaacaattgcgggtgcaagactcaagttttttagaatccattagcagagaaccctatttctcccattaactgctgtccttttaaatcctggcaccagctctgaggactgcagggtccatagctagtgccccactctacccagtttaaagacaccactgcctggaaatgacaggggtttttttcttaaggaaagaggtgctttctgccacgtatatataaattggtaagcttcaaataaagtgcttttgtcctttctgtctatcagaaactgtgcaaatcgaattgctgtaaaaccaagggcaagagacatcaatcctgcattctatagcatctgattttatcctttatccccaggcacatttcaaaaggaaaaaaatgaggttgcatttaaattgagtatttgggacttgccaggaaaacctcccgctagactaatatgattgcagggaaaacaagagaaaggaaaagtggagagggagtgtgctaacagatcctgggcctcgtcagcagagccgtcctgagcacaaggccatggtcagacatctggtcccgcgaatgacgttttctttatggtcattaagaacaccagtgtgtcgggacacaaacaagtattcctttcagggattatgacacattttctcccaaagtagtatattaatgacatttccagagcattctttactatcttttatatgtgatcaggaagactaatacatatcactacttcttttacacacagcattagccaaaactaaagtgtcaaatacaattttgcctaggatgaataaacagaagaaatttttatgatactgcactatcaattccaaattaaataacaacaaaatgataagtgttaaaattcatattaatgattgttcccacacaagccggaaaaaatctttctaagaagtctttcatgagttaatcccatctttcaaagtgttcagtggctccgaattcagttactgtttcctatcagttcttctttcattaagtctcttcccttttttttctctttgcactatttcccttagccgggtacataatctgctgtgctttattcatttgtgtcttaagtttgtttcccgatgacatacctttccagcaacgccatctggggagtttgggcaactgtaccacgttaggaggaaacccttcttcacaggagagtgtgcctttgctgcagggaaggaattaggatttgcttggactgtggttgcagctggcttttaaggatctccttagaatgcaagcaactcatcaatgagaatctctgcaatggttgtcactgggtagagtcatgctatgtggggtcatagcctttgaaacaaataacagtaaagataaaaatgctattaaaggaatcaccacccacagaggttaactgggttttgtccccagaccacctcgaacaagaaagaacatttttatcagtcattttcttagttttagctgataaaacaaagtaccatagactaggtggcttataaacaacagaaatttatttttcacagctttggaaactggaagtctgagatcaggccgccagaatgatcagattctagttagggcctactttgcttttgcagactgccaacttctagctgcattttcatgtggcaaaaggagattgagctagctctctggtctcttcttataaggacactaatcccattcatgaaggcttcaccttcatcatctaattactctccaaagaccccacctccaaatactatcacattgggaattagatttcaaatacaaattttgcggggacacaaatattcagtccataatagtaatgattactcattatacatagggctctaaatgtgctagcttctgatagtttttacactcacttctctttattagcttgtcaagcataattagggcagtggccttactgaaaattattgaatttagtttcctaaggacagatattgaggagttttttcttcactaaaaattcacgttccgatacagctttcatctgttactactttgtgagatggaaaatcttttattttatttttatgtttggattgacccttcttaataaagtcggcatgtaatatgcttcatgtgtttctaatatgtgcttaattttgcaaaatgttttgcataccagaatgcatttctcttccaaaaaaggtaccagcctacaaaaccttgctgttactgttttcaattagttcatggaattaaatgtattaaatgttttatgctctggcagaaattatgattctcacttaactccatataaatctggatctgcctgggcctttataagtgacacaatttcattaactgaataaacaaatgatacaaagaaatttggtttagccttctaaaattccaaaggcgttcaacaaaatatctcagaatggatgttccaggacttttatggcacaggacaacatgtattgcttattttaagaaaataagctaaatagtgaggggattcttttagcagatcctcaggatgtgttaggttgaatcataggcaaatgatatttgatcattgcacctgttaacacattgaacctcatcctaaaattgtagagctagaagaaagccttctggcagtttttaaatagattgatttactgcaatttatccagaagcttcaccgttgtcactggctacatgtgactttggcctctgtggggctatatcctcatttgtaaaattggtggtgaggtaggtggacagttgactaaataatctcttagaataattctagtatctgtggatctaaagcatccaggggttgaatatgtttctttctggccaagaaaagatgcacctgtcaataatgcccaaactcatcttctgagaatcctctttcccaagatacccactctcccttgggttatattatagtaatgatcagaagcccctgccaagaagaaactgttaacctgggaggtctatattttatttcacagccatctgtttatactttctcacaagttagtgcacagtatacccatcattttctaccattttccttaatttattaattttactaattgcataattaacaaaagtaagaagattttacctccttatccccatctggtagtttgcagatacttggcctgatgacaactgacagtgatgagatactcaccaagtttaccagggcaggaggcttcctagagaaaaaatgagaaaatgaaatggggaaggggagtgaaggattgaggaggtgacaatctggactcttgcaactgcatggcaaggttggcacacaagctgggttgcaacggagggaaggagatccttatcagatgtaatcagagctcagatcgagggctttggtgtgtgtagaaagagggagagacaaagaacttaaaacagagctgccatttgaccttgcaatcccattacttggtgtatacccaaaggagaataaatcattctattaaaaagacacatgtgcttgtatgttcatggcagcactattcacaatagctaagacatggaatcaaactaggtgtccatctatggcagattggataaagaaaatggggtaaatataaagcatgcaatacaacatggccataagaaaaaatgaaatcatgtcctttgctgcaacatggatgcagttgggacccataatcctaagtgaattaacacaggaacagaaaaccaaatacagcatgttctcacttataagtgggagctaaacactgagcacacatggacataaatatgagaacaataaacactgtggactactagaggggggaaggagagaggtttgtaaaactacctatcaggtgctatgctcaatacctgggtgatgggatttacaccccaaacatcagcatcatttaatattcccatgtaaaaagactgcacatataccccttgtatctaaaataaaacttgaaattaaaaaaaaaagaaagaaagaaagaggctggaaatagaggctcacacctgtaatcccagcactttgggtggccaaggtgggtggattgcttgagcccgggaattcaagaccagcctgagaaacctggtgaaactctgtctgtacaaaaaatacaaaaattatccaggcatggtggagcgcacctgtagtcccagctaatggggaggctgaggggggaacatcacttgagcccaggaggtggaggttgcagtgagctgggatcacaccactgcactacagcctgggtaacagagcaactctgtctcaaagagagagaggaaagaaaaaagaaaagatggacagataagaaaatgcacttggagattaagagaaagcagcaacataggaccctggataatgtgtttgcttaataactatcctgatgagttatctgactattcccaaatgagtacgtggcaattcaggctgaaccatcagagtagccctccggaatcttacttatgtacaatagacctgcatgcacatttactagaatgagcctctctctctggtaatcatgtctgcttccactaattccatctgtttcctctctctccctcctatcctgctagatcttaattccttcgaccttcctttgtttttctaactccctttctttctcttgttatttaacctgctatactatgcaattgatctcctctgcactaaggaacatgcacttcagaattctgttgacatcttgcattcctttatatttagtgaaagaatgcaaaggagtctacctggcaatattcactctgcaggaggcaataattattattcaaattaaaggaagcagtaaagagaaattcagaaaaaatgaaatatactaatcttcagcttttcatttcagcctacaaggaaaaaatgaaggagctgtccatgctgtcactgatctgctcttgcttttacccggaacctcgcaacatcaacatctatacttacgatggtgagtaacctaggatagacatacccctgctagctagatcatttggaaaggttgacatatatttgtttcttacagctcctgatataattacatcaatattttgtagctctcactattgacttgccgtgtctagctattatgtccaattgattacctattgctgaaaacagtttgaatttggtgctaataacaacacatcaatgtctgttaagaaatgtggatggattcttattaacagccacatccagcatatcaacatccacaatatgtctaaggtctttctttgcaaataatttaataggctaagccataattggagtagatcataatttgtaagaaaatgctttatacttagaaaactcaagagaaagaatcaacaaccataattgtttttgctttattgtagtctttataaagtttctatactttgtatatacatgtcaaccagctaatgataataataattggctcaataaataaaactgacttacgactgaggccctagataaagagggtctgaaaagaaaagcctaaagaattagcatggcaattaacatgattgaggtgcaactctttaggtttgatttatcctgattcattttgcttactttggctctgccacaatccacatgatcttggtcaaatagatacttggattctctaagtctcatttaactctagcatcttcctcttggagttgttgtgaggtttaaacggtttaatgtaagtcaaatatgcaaaaccaagcctagctcattatatcactctacaatgatagctatcattatcaacatcatccttacctaattcagtcaatttaactaaaatattttatacagttctatgtatcctagatatccctaaggcatattttactaactctcaggctcacaaatatttttcttttccatatatgtaaagaaagacattaatgacaaaacaaactgaccttgtggcagttaaccccttctgcacctttaaagcctattcaaggactcaaaggcatttaccttccaaagttattctatcgtagcacaaaaatcataaatgctaattaactgttccataaggaaatgtcctccatgtgaaaggaattctgtctccaaacaaaacattcattagaatgcagggccaatgcctactttgtacaaattcattcggtcagcaaataaattagacagacctttattatttgctagatgtagctgtgaagaaggatccagctatgtttcttatgagactaatgtcgaactatgggttgtcactgaggatccagagttccatagggcgtagtcctcaccttcaaagaattcagggcttagtagaagagtcttacacaaatgactagaatgtagaacacagagtggttaggacaaaggagccagggatggtttttgctgggttagggaatgaaaaaaggggaagaaaatatgtgaagttatgtgtgagctgattcttgaaataagctgtttttatttgcctgcgttctcttataatccttttccataggcttccataatttttattgagctgtatttaaagttgaatagataattcaacatttctcgtaaactgtgcttcctaaaagagtccgtagagaatttcaaatttctgcagtctttaacttgacctggtatttctatgttagataataacgtgacttgtttattgcaggcaaacattataacaataaattattattattgtttacatttgtaagcactaagtatatggcttgtgctttgcattcagcatcctttatcatttaatcttcacaaccaccttagaaggaaggtactctttttatttccatcttttaaatgaggaaataaaagcataaagaagttaattaacttacctagtgtcacacagctattaagaggggcttactatttggatgcaaatataggcagttctaattccagagcctctaatctaaggcatttaaaaccccatcaccttatcaaataagctgtttttatttgcccgtgttctcttataatccttatccataggtttccataatttttataaaattgtatttaaaatttaagtataatcttggatgccatcaggaaaatgaaaaacatttttacatttgtgaaggaaaaagcccacatcatttccaatatagttattgagttagtattatctagactatctattagcagctaaggatctgaggtcaaggcctgccagcctggcattttacttgaccacaacctccatgtgcactaaccaggctgctaaaagaacattaacgggaacataacctgctggcttggttgccacaattttaaaaagacgttaataaattagagagcacttagaggttaggaaataatatggtggtaaagatctagaaacagtgtcattctggggcacttgaagatgtttagcctgggggaacaacttgaaatggaacataactgttttcaaatacttgaaaaatggtggtgcaccacagagaatggcctaatcatgggtagcttcagacttcaaacaaggatcagtgggctaaaaccagagagatggagtttgggactcaaagaatgctcatctgaaattgagggctgaccagcgaggttcttttaaaaatcattgcattttactaaattgtgagttctgtaattataaatgtcctagcaggtgctagctgtcatcttttctattataaattatactattttatgttataatttgtattatacaggcttaaaacataagggtctgataatctgcttatctttaatacataagccactgatagaaaataagtggctaaccattcttcagttctttttttaattgacaaaaattgtatatgtttgcggtgtatggcatattttgaaatatgtatacattagagaatggctaagtgaagcaaattcacatatgcattacctcacacacctgtcatttatttgtgatgagaacaaaaaatctactctttcagtgattttcaagaatacagtacattgttattaacaatagtcagcatggtgtacaataagtcttctgcggccgggcgtggtggctcacgcctataatcccagcactttgggaggccaaggctggcagatcacgaggtcaggagttcgagaccagcctgaccaacatgctgaaaccttgcctctactaaaaatagaaaaattagctgagtgtggtggtaagcgcctgtagtcccagctactcaggaggctgaggcaggagaattgcttgaacctgggaggcggaggttgcagtgagtcgagatagtgccactgcactccagcctggcaaaagagggaaactccgtctcaataataagtctcttgcatttgttcttcctgtttaactgaaattatgtattctttgatcaacatctccccagtctccacccctaacccctggtaaccacaattctactctgcttccgtgagttcaactttatgaatagtccacatgtaagtgagatcatgtggtatttgtctttctgtgcctagcttatttcacttagcatagtgtcctccaggttcacccatgttgtcaaaaatgacaggatttcccccaacttttttaaggctgaacagtattccatgtgtatgtgtataaattagattagtagatgttgccactccctcctccaccacagtggctctatccctggctcctggctccagccgagtacactagaggaggatattctaaacagcaacaacacaggagcaaagacattacaatggggtgttgtcttattgcccccattagactgtaagcatcttgaagacaaggacccccatcacagagtgatgttgtcatccctggagtgggcactgtgcatgattgatgactggaagcaatgaacatacagaagggcaaaacagaaatcagcaggatgctttgcatttcagcattgactttgccaaatatgcccaactgttcagggagttacattggttctaacgaagctcctgtgattcctaagcacaggaatggtgataatatatataatggtgcatgcatatatacgcatatctagataatgatatctcattatatgtgagaactgaagaactccgttatgtttctcgtctaaccaaaaagggcctacagctacgataatttccaaacaaataaatctgtgctacttgattttcatgcaaagctcatatttgttcaaaaggaaaataaagcttaatttaaaatcaatttaggctatttttatctaagtatgcttaccgttattcaactccctgcagatattgtcaaatttctcaatatggtaaatatttattctgttaaaatatatccatagttacactaaagacagagaggtcttatatgttctaaacaacatagagcaaatgctcataaacagcattttattcctatctcccggaataacaacgctacttccaattgctggaatctaaattattaaaataaacccatgctgcaagctttgtatgcttaacattctcaaatgttcacttttcagatatggaagtgaagcaaatcaacaaacgtgcctctggccaggcttttgagctgatcttgaagccaccatctcctatctcagaagccccacgaactttagcttctccaaagaagaaagacctgtccctggaggagatccagaagaaactggaggctgcagaggaaagaagaaaggtaactttttccataggttttccttctctctctccctcccctgctcctccctctcacacactcgggcacacatgcacgcacacacacacacacacacacacacacacacacacacacacacatacagagagcaatgacagctgaacctgtgccatgccaacatgtataggttttcagtagacacagagccaggctagttggggtaaaaactgtaagatagatgctaattttaggctagccaaaccagagctctcagaaatccaaagagcttcagtgctctagtgccccttcccgtatattgaatccccttattataaaagcctcccttccctagaccatcaggcagaagcactgtagagaaaacacagccctggcgaactccagtggtggggaggggaagaagtgctgcttcctccctctcaggatctgtgtcaccccctttgtcaggcgtggttttccttggaattacaaattaccagatcttccctccaagatctttcctgcccagggtaagggccaagagcttgcccctttcctcttcagagtcccactgcctgccctggaagttggtccttccaagatcaggaccttctctgagttctttgaatatgttctttatctttttctaagacttgatggggatttttctctttttgccattggtccctgcttatattaaagagctttccttttgccaaatctttacttttccataatcacatggctaagaagagccaagggtattatttgagaacacttagaaatcctagggactgtgtacacaaacagaagttgtttgaatgtgtctgttccaaccatgtggttatggtagttaatcccatcaaggtactcacgatcatccaaaaatggaattcttttatgtaattcatccccacattgtatttcccaatattttttatgatataattttagaatcaggtaatcactaagaacatgttccctgcacagttttatgatgttttctctaaaaagtcagccaaaactttggacacttctatgttggataattaaaaacagaatgaagataatcctcctcctaaagattgaattctccaagagagaatgcaggacaaacacagatgtgctgtgtatagtatatgtgcatatatacatgcatatatgtacacaaatatgtgtattatcaaataatgaggctcaaacattagaaatccttagattaaattttctaaacaagaaaacactaatctttgtagttgaaaaaaaatcctcctatgatatgtaatatgctgatctcaattttcacctaagagtgatgttctccaaatgtccgatgagcatgtcatatatatatatatgaatttttatatatataattacaatggtaattggtatatagagatatctatattatagatatatatagctatctctatatattacatataccaattatagatataaatataacaatggtaactggtgtatatgtgatgtgtatatatgtatatgtataccataattatatattaatattgtatatatgccataattatatattaatattggtatatatacaccatgattatatattaatattggtgtgtgtatgtgtgtgtgtatatatatatatatatataaaatactagttatcattgttctagatttaaaaaacaggaacctgagctactaactcgactatatatatatatatatatacaggaagttgctttaaaacatttttatcagcttttttattgttatttttagctttattctcatagtaaagctaaaataaattattcaacattatcaaaactttgctgccagcagatgtaagcaatacctaaaacagtggagagcatgttgcacccaaagcagtttaagctctgacccaagcactggcatcttataggcactgggtagagataagagtcataggtcgacatatattgagatgctatgacttgattagaatatggagtcagtgactgaggtgaaattaaaactcaaaccacaattcaacatcctgatttaggatgttgctggtgtttctaggtactacacttaatttgaaagaaattattgaggataaaaaaagaactgggatcaacaaaattaactaggtgttcttataagagtccctgaggttactaattaatgaaactgataaagctcctgcaccctgacagcaagaaattatcaatgattatacatttaaacaattgaattgaactagaaactggccacatggttaaaagacatttacaaatgtaatcatccagtgttatgatgcccagaaaaaaaaaattccttagaatgctttaaaagccgtattccatcacctttccagt

SEQ ID NO: 455 - DNA, 119 bp, Homo sapiens
  source 1..119: mol_type = unassigned DNA
tagccggaccctttgccttcgccactgctcagcgtctgcacatccctacaatggctaaaacagcaatgggtaaggcactgcgcctcgttctccgtcggctctacctggagcccacctct

SEQ ID NO: 456 - DNA, 104 bp, Homo sapiens
  source 1..104: mol_type = unassigned DNA
aatctttcaaaacctccctggcttagaaaaccaaatttttgtagagagagatgggtagaatctaattttattctaaagcaattagcattacatcatcacagcag

SEQ ID NO: 457 - DNA, 196 bp, Homo sapiens
  source 1..196: mol_type = unassigned DNA
gagaaattcagaaaaaatgaaatatactaatcttcagcttttcatttcagcctacaaggaaaaaatgaaggagctgtccatgctgtcactgatctgctcttgcttttacccggaacctcgcaacatcaacatctatacttacgatggtgagtaacctaggatagacatacccctgctagctagatcatttggaaag

SEQ ID NO: 458 - DNA, 273 bp, Homo sapiens
  source 1..273: mol_type = unassigned DNA
ccatgctgcaagctttgtatgcttaacattctcaaatgttcacttttcagatatggaagtgaagcaaatcaacaaacgtgcctctggccaggcttttgagctgatcttgaagccaccatctcctatctcagaagccccacgaactttagcttctccaaagaagaaagacctgtccctggaggagatccagaagaaactggaggctgcagaggaaagaagaaaggtaactttttccataggttttccttctctctctccctcccctgctcctcc

SEQ ID NO: 459 - DNA, 292 bp, Homo sapiens
  source 1..292: mol_type = unassigned DNA
ctaggtttgtgtttggataattataagatggctatgtttttcttccccagtctcaggaggcccaggtgctgaaacaattggcagagaagagggaacacgagcgagaagtccttcagaaggctttggaggagaacaacaacttcagcaagatggcggaggaaaagctgatcctgaaaatggaacaaattaaggaaaaccgtgaggctaatctagctgctattattgaacgtctgcaggaaaaggtaatctcagcagagtcctgagcagatggatatattcatatgcagcacag

SEQ ID NO: 460 - DNA, 182 bp, Homo sapiens
  source 1..182: mol_type = unassigned DNA
tgtagactccttgagattaatagagtttaacgataagttttactttatagctggtcaagtttatttcttctgaactaaaagaatctatagagtctcaatttctggagcttcagagggaaggagagaagcaatgtaagcaacattctacagaaatataaataatactactaataattagcatc

SEQ ID NO: 461 - DNA, 160 bp, Homo sapiens
  source 1..160: mol_type = unassigned DNA
accagacaaaaagggcctgtgacatttcttcttccttttgtgttttttaggagaggcatgctgcggaggtgcgcaggaacaaggaactccaggttgaactgtctggctgaagcaagggagggtctggcacgccccaccaatagtaaatccccctgcctat

SEQ ID NO: 462 - RNA, 36 nt, synthetic construct
  source 1..36: mol_type = other RNA
tctcaacgatagtcagacatgtgtcctcagtgacac

SEQ ID NO: 463 - RNA, 36 nt, synthetic construct
  source 1..36: mol_type = other RNA
ttttaacaacactcaggcatgtgtccacagtgacac

SEQ ID NO: 464 - RNA, 36 nt, synthetic construct
  source 1..36: mol_type = other RNA
ttgaacggatactcagacatgtgtttccagtgacac

SEQ ID NO: 465 - RNA, 36 nt, synthetic construct
  source 1..36: mol_type = other RNA
tgccctcaatagtcagatgtgtgtccacagtgacac

SEQ ID NO: 466 - RNA, 36 nt, synthetic construct
  source 1..36: mol_type = other RNA
tctcaatgatacttagatacgtgtcctcagtgacac

SEQ ID NO: 467 - RNA, 36 nt, synthetic construct
  source 1..36: mol_type = other RNA
tctcaatgatactcagacatgtgtccccagtgacac

SEQ ID NO: 468 - RNA, 36 nt, synthetic construct
  source 1..36: mol_type = other RNA
tctcaatgatactaagacatgtgtcctcagtgacac

SEQ ID NO: 469 - RNA, 36 nt, synthetic construct
  source 1..36: mol_type = other RNA
tctcaactatactcagacatgtgtcctcagtgacac

SEQ ID NO: 470 - RNA, 36 nt, synthetic construct
  source 1..36: mol_type = other RNA
tctcaacgatactcagacatgtgtcctcagtgacac

SEQ ID NO: 471 - RNA, 36 nt, synthetic construct
  source 1..36: mol_type = other RNA
tctcaacgatactaagatatgtgtcctcagcgacac

SEQ ID NO: 472 - RNA, 36 nt, synthetic construct
  source 1..36: mol_type = other RNA
tctcaacgatactaagatatgtgtccccagtgacac

SEQ ID NO: 473 - RNA, 36 nt, synthetic construct
  source 1..36: mol_type = other RNA
tctcaacgatactaagatatgtgtccacagtgacac

SEQ ID NO: 474 - RNA, 36 nt, synthetic construct
  source 1..36: mol_type = other RNA
tctcaacaatactcagacatgtgtccccagtgacac

SEQ ID NO: 475 - RNA, 36 nt, synthetic construct
  source 1..36: mol_type = other RNA
tctcaacaatactaaggcatgtgtccccagtgaccc

SEQ ID NO: 476 - RNA, 36 nt, synthetic construct
  source 1..36: mol_type = other RNA
tctcaaagatactcagacacgtgtccccagtgacac

SEQ ID NO: 477 - RNA, 36 nt, synthetic construct
  source 1..36: mol_type = other RNA
tctcaaaaatactcagacatgtgtcctcagtgacac

SEQ ID NO: 478 - RNA, 36 nt, synthetic construct
  source 1..36: mol_type = other RNA
gcgaaacaacagtcagacatgtgtccccagtgacac

SEQ ID NO: 479 - RNA, 36 nt, synthetic construct
  source 1..36: mol_type = other RNA
cctcaacgatattaagacatgtgtccgcagtgacac

SEQ ID NO: 480 - RNA, 22 nt, synthetic construct
  source 1..22: mol_type = other RNA
agacatgtgtcctcagtgacac

SEQ ID NO: 481 - DNA, 3222 bp, unidentified
  source 1..3222: mol_type = unassigned DNA
atggcttccatctctaggccatacggcaccaagctgcgaccggacgcacggaagaaggagatgctcgataagttctttaatacactgactaagggtcagcgcgtgttcgcagacctggccctgtgcatctatggctccctgaccctggagatggccaagtctctggagccagaaagtgattcagaactggtgtgcgctattgggtggtttcggctggtggacaagaccatctggtccaaggatggcatcaagcaggagaatctggtgaaacagtacgaagcctattccggaaaggaggcttctgaagtggtcaaaacatacctgaacagccccagctccgacaagtacgtgtggatcgattgcaggcagaaattcctgaggtttcagcgcgagctcggcactcgcaacctgtccgaggacttcgaatgtatgctctttgaacagtacattagactgaccaagggcgagatcgaagggtatgccgctatttcaaatatgttcggaaacggcgagaaggaagaccggagcaagaaaagaatgtacgctacacggatgaaagattggctggaggcaaacgaaaatatcacttgggagcagtatagagaggccctgaagaaccagctgaatgctaaaaacctggagcaggttgtggccaattacaaggggaacgctggcggggcagaccccttctttaagtatagcttctccaaagagggaatggtgagcaagaaagaacatgcacagcagctcgacaagttcaaaaccgtcctgaagaacaaagcccgggacctgaattttccaaacaaggagaagctgaagcagtacctggaggccgaaatcggcattccggtcgacgctaacgtgtactcccagatgttctctaacggggtgagtgaggtccagcctaagaccacacggaatatgtcttttagtaacgagaaactggatctgctcactgaactgaaggacctgaacaagggcgatgggttcgagtacgccagagaagtgctgaacgggttctttgactccgagctccacactaccgaggataagtttaatatcacctctaggtacctgggaggcgacaaatcaaaccgcctgagcaaactctataagatctggaagaaagagggtgtggactgcgaggaaggcattcagcagttctgtgaagccgtcaaagataagatgggccagatccccattcgaaatgtgctgaagtacctgtggcagttccgggagacagtcagtgccgaggattttgaagcagccgctaaggctaaccatctggaggaaaagatcagccgggtgaaagcccacccaatcgtgattagcaataggtactgggcttttgggacttccgcactggtgggaaacattatgcccgcagacaagaggcatcagggagagtatgccggtcagaatttcaaaatgtggctggaggctgaactgcactacgatggcaagaaagcaaagcaccatctgcctttttataacgcccgcttctttgaggaagtgtactgctatcacccctctgtcgccgagatcactcctttcaaaaccaagcagtttggctgtgaaatcgggaaggacattccagattacgtgagcgtcgctctgaaggacaatccgtataagaaagcaaccaaacgaatcctgcgtgcaatctacaatcccgtcgccaacacaactggcgttgataagaccacaaactgcagcttcatgatcaaacgcgagaatgacgaatataagctggtcatcaaccgaaaaatttccgtggatcggcctaagagaatcgaagtgggcaggacaattatggggtacgaccgcaatcagacagctagcgatacttattggattggccggctggtgccacctggaacccggggcgcataccgcatcggagagtggagcgtccagtatattaagtccgggcctgtcctgtctagtactcagggagttaacaattccactaccgaccagctggtgtacaacggcatgccatcaagctccgagcggttcaaggcctggaagaaagccagaatggcttttatccgaaaactcattcgtcagctgaatgacgagggactggaatctaagggtcaggattatatccccgagaacccttctagtttcgatgtgcggggcgaaaccctgtacgtctttaacagtaattatctgaaggccctggtgagcaaacacagaaaggccaagaaacctgttgaggggatcctggacgagattgaagcctggacatctaaagacaaggattcatgcagcctgatgcggctgagcagcctgagcgatgcttccatgcagggaatcgccagcctgaagagtctgattaacagctacttcaacaagaatggctgtaaaaccatcgaggacaaagaaaagtttaatcccgtgctgtatgccaagctggttgaggtggaacagcggagaacaaacaagcggtctgagaaagtgggaagaatcgcaggtagtctggagcagctggccctgctgaacggggttgaggtggtcatcggcgaagctgacctgggggaggtcgaaaaaggaaagagtaagaaacagaattcacggaacatggattggtgcgcaaagcaggtggcacagcggctggagtacaaactggccttccatggaatcggttactttggagtgaaccccatgtataccagccaccaggaccctttcgaacataggcgcgtggctgatcacatcgtcatgcgagcacgttttgaggaagtcaacgtggagaacattgccgaatggcacgtgcgaaatttctcaaactacctgcgtgcagacagcggcactgggctgtactataagcaggccaccatggacttcctgaaacattacggtctggaggaacacgctgagggcctggaaaataagaaaatcaagttctatgactttagaaagatcctggaggataaaaacctgacaagcgtgatcattccaaagaggggcgggcgcatctacatggccaccaacccagtgacatccgactctaccccgattacatacgccggcaagacttataataggtgtaacgctgatgaggtggcagccgctaatatcgttatttctgtgctggctccccgcagtaagaaaaacgaggaacaggacgatatccctctgattaccaagaaagccgagagtaagtcaccaccgaaagaccggaagagatcaaaaacaagccagctgcctcagaaa

SEQ ID NO: 482 - protein, 1074 aa, unidentified
MASISRPYGTKLRPDARKKEMLDKFFNTLTKGQRVFADLALCIYGSLTLEMAKSLEPESDSELVCAIGWFRLVDKTIWSKDGIKQENLVKQYEAYSGKEASEVVKTYLNSPSSDKYVWIDCRQKFLRFQRELGTRNLSEDFECMLFEQYIRLTKGEIEGYAAISNMFGNGEKEDRSKKRMYATRMKDWLEANENITWEQYREALKNQLNAKNLEQVVANYKGNAGGADPFFKYSFSKEGMVSKKEHAQQLDKFKTVLKNKARDLNFPNKEKLKQYLEAEIGIPVDANVYSQMFSNGVSEVQPKTTRNMSFSNEKLDLLTELKDLNKGDGFEYAREVLNGFFDSELHTTEDKFNITSRYLGGDKSNRLSKLYKIWKKEGVDCEEGIQQFCEAVKDKMGQIPIRNVLKYLWQFRETVSAEDFEAAAKANHLEEKISRVKAHPIVISNRYWAFGTSALVGNIMPADKRHQGEYAGQNFKMWLEAELHYDGKKAKHHLPFYNARFFEEVYCYHPSVAEITPFKTKQFGCEIGKDIPDYVSVALKDNPYKKATKRILRAIYNPVANTTGVDKTTNCSFMIKRENDEYKLVINRKISVDRPKRIEVGRTIMGYDRNQTASDTYWIGRLVPPGTRGAYRIGEWSVQYIKSGPVLSSTQGVNNSTTDQLVYNGMPSSSERFKAWKKARMAFIRKLIRQLNDEGLESKGQDYIPENPSSFDVRGETLYVFNSNYLKALVSKHRKAKKPVEGILDEIEAWTSKDKDSCSLMRLSSLSDASMQGIASLKSLINSYFNKNGCKTIEDKEKFNPVLYAKLVEVEQRRTNKRSEKVGRIAGSLEQLALLNGVEVVIGEADLGEVEKGKSKKQNSRNMDWCAKQVAQRLEYKLAFHGIGYFGVNPMYTSHQDPFEHRRVADHIVMRARFEEVNVENIAEWHVRNFSNYLRADSGTGLYYKQATMDFLKHYGLEEHAEGLENKKIKFYDFRKILEDKNLTSVIIPKRGGRIYMATNPVTSDSTPITYAGKTYNRCNADEVAAANIVISVLAPRSKKNEEQDDIPLITKKAESKSPPKDRKRSKTSQLPQK

SEQ ID NO: 483 - protein, 1074 aa, synthetic construct
MASISRPYGTKLRPDARKKEMLDKFFNTLTKGQRVFADLALCIYGSLTLEMAKSLEPESDSELVCAIGWFRLVDKTIWSKDGIKQENLVKQYEAYSGKEASEVVKTYLNSPSSDKYVWIDCRQKFLRFQRELGTRNLSEDFECMLFEQYIRLTKGEIEGYAAISNMFGNGEKEDRSKKRMYATRMKDWLEANENITWEQYREALKNQLNAKNLEQVVANYKGNAGGADPFFKYSFSKEGMVSKKEHAQQLDKFKTVLKNKARDLNFPNKEKLKQYLEAEIGIPVDANVYSQMFSNGVSEVQPKTTRNMSFSNEKLDLLTELKDLNKGDGFEYAREVLNGFFDSELHTTEDKFNITSRYLGGDKSNRLSKLYKIWKKEGVDCEEGIQQFCEAVKDKMGQIPIRNVLKYLWQFRETVSAEDFEAAAKANHLEEKISRVKAHPIVISNRYWAFGTSALVGNIMPADKRHQGEYAGQNFKMWLEAELHYDGKKAKHHLPFYNARFFEEVYCYHPSVAEITPFKTKQFGCEIGKDIPDYVSVALKDNPYKKATKRILRAIYNPVANTTGVDKTTNCSFMIKRENDEYKLVINRKISRDRPKRIEVGRTIMGYDRNQTASDTYWIGRLVPPGTRGAYRIGEWSVQYIKSGPVLSSTQGVNNSTTDQLVYNGMPSSSERFKAWKKARMAFIRKLIRQLNDEGLESKGQDYIPENPSSFDVRGETLYVFNSNYLKALVSKHRKAKKPVEGILDEIEAWTSKDKDSCSLMRLSSLSDASMQGIASLKSLINSYFNKNGCKTIEDKEKFNPVLYAKLVEVEQRRTNKRSEKVGRIAGSLEQLALLNGVEVVIGEADLGEVEKGKSKKQNSRNMDWCAKQVAQRLEYKLAFHGIGYFGVNPMYTSHQDPFEHRRVADHIVMRARFEEVNVENIAEWHVRNFSNYLRADSGTGLYYKQATMDFLKHYGLEEHAEGLENKKIKFYDFRKILEDKNLTSVIIPKRGGRIYMATNPVTSDSTPITYAGKTYNRCNADEVAAANIVISVLAPRSKKNREQDDIPLITKKAESKSPPKDRKRSKTSQLPQK

SEQ ID NO: 484 - protein, 1074 aa, synthetic construct
MASISRPYGTKLRPDARKKEMLDKFFNTLTKGQRVFADLALCIYGSLTLEMAKSLEPESDSELVCAIGWFRLVDKTIWSKDGIKQENLVKQYEAYSGKEASEVVKTYLNSPSSDKYVWIDCRQKFLRFQRELGTRNLSEDFECMLFEQYIRLTKGEIEGYAAISNMFGNGEKEDRSKKRMYATRMKDWLEANENITWEQYREALKNQLNAKNLEQVVANYKGNAGGADPFFKYSFSKEGMVSKKEHAQQLDKFKTVLKNKARDLNFPNKEKLKQYLEAEIGIPVDANVYSQMFSNGVSEVQPKTTRNMSFSNEKLDLLTELKDLNKGDGFEYAREVLNGFFDSELHTTEDKFNITSRYLGGDKSNRLSKLYKIWKKEGVDCEEGIQQFCEAVKDKMGQIPIRNVLKYLWQFRETVSAEDFEAAAKANHLEEKISRVKAHPIVISNRYWAFGTSALVGNIMPADKRHQGEYAGQNFKMWLRAELHYDGKKAKHHLPFYNARFFEEVYCYHPSVAEITPFKTKQFGCEIGKDIPDYVSVALKDNPYKKATKRILRAIYNPVANTTRVDKTTNCSFMIKRENDEYKLVINRKISRDRPKRIEVGRTIMGYDRNQTASDTYWIGRLVPPGTRGAYRIGEWSVQYIKSGPVLSSTQGVNNSTTDQLVYNGMPSSSERFKAWKKARMAFIRKLIRQLNDEGLESKGQDYIPENPSSFDVRGETLYVFNSNYLKALVSKHRKAKKPVEGILDEIEAWTSKDKDSCSLMRLSSLSDASMQGIASLKSLINSYFNKNGCKTIEDKEKFNPVLYAKLVEVEQRRTNKRSEKVGRIAGSLEQLALLNGVEVVIGEADLGEVEKGKSKKQNSRNMDWCAKQVAQRLEYKLAFHGIGYFGVNPMYTSHQDPFEHRRVADHIVMRARFEEVNVENIAEWHVRNFSNYLRADSGTGLYYKQATMDFLKHYGLEEHAEGLENKKIKFYDFRKILEDKNLTSVIIPKRGGRIYMATNPVTSDSTPITYAGKTYNRCNADEVAAANIVISVLAPRSKKNREQDDIPLITKKAESKSPPKDRKRSKTSQLPQK

SEQ ID NO: 485 - RNA, 36 nt, synthetic construct
  source 1..36: mol_type = other RNA
gttggaatgactaatttttgtgcccaccgttggcac

SEQ ID NO: 486 - RNA, 24 nt, synthetic construct
  source 1..24: mol_type = other RNA
aatttttgtgcccatcgttggcac

SEQ ID NO: 487 - RNA, 23 nt, synthetic construct
  source 1..23: mol_type = other RNA
atttttgtgcccatcgttggcac

SEQ ID NO: 488 - RNA, 36 nt, synthetic construct
  source 1..36: mol_type = other RNA
ctagcaatgacctaatagtgtgtccttagttgacat

SEQ ID NO: 489 - RNA, 36 nt, synthetic construct
  source 1..36: mol_type = other RNA
cctacaatacctaagaaatccgtcctaagttgacgg

SEQ ID NO: 490 - RNA, 22 nt, synthetic construct
  source 1..22: mol_type = other RNA
atagtgtgtccttagttgacat

SEQ ID NO: 491 - DNA, 30 bp, Homo sapiens
  source 1..30: mol_type = unassigned DNA
tccgtcggctctacctggagcccacctctc

SEQ ID NO: 492 - DNA, 30 bp, Homo sapiens
  source 1..30: mol_type = unassigned DNA
ggaagtattttctcttcaaggtgagtctgt

SEQ ID NO: 493 - DNA, 30 bp, Homo sapiens
  source 1..30: mol_type = unassigned DNA
aaactaggcatcaatttggaagtattttct

SEQ ID NO: 494 - DNA, 30 bp, Homo sapiens
  source 1..30: mol_type = unassigned DNA
aataagccccaggtaagctattaaaactag

SEQ ID NO: 495 - DNA, 30 bp, Homo sapiens
  source 1..30: mol_type = unassigned DNA
gaataagccccaggtaagctattaaaacta

SEQ ID NO: 496 - DNA, 30 bp, Homo sapiens
  source 1..30: mol_type = unassigned DNA
tttgaataagccccaggtaagctattaaaa

SEQ ID NO: 497 - DNA, 30 bp, Homo sapiens
  source 1..30: mol_type = unassigned DNA
tcccaaagcctaaatcatggcaattatttg

SEQ ID NO: 498 - DNA, 30 bp, Homo sapiens
  source 1..30: mol_type = unassigned DNA
ctcccaaagcctaaatcatggcaattattt

SEQ ID NO: 499 - DNA, 30 bp, Homo sapiens
  source 1..30: mol_type = unassigned DNA
caacccacacggcctcatagctctctttct

SEQ ID NO: 500 - DNA, 30 bp, Homo sapiens
  source 1..30: mol_type = unassigned DNA
ccaccagaaatcgatgctgtgctgagcctg

SEQ ID NO: 501 - DNA, 30 bp, Homo sapiens
  source 1..30: mol_type = unassigned DNA
tggaactggtcatcagagtgtgttcccacc

SEQ ID NO: 502 - DNA, 30 bp, Homo sapiens
  source 1..30: mol_type = unassigned DNA
ctggaactggtcatcagagtgtgttcccac

SEQ ID NO: 503 - DNA, 30 bp, Homo sapiens
  source 1..30: mol_type = unassigned DNA
tttctggaactggtcatcagagtgtgttcc

SEQ ID NO: 504 - DNA, 30 bp, Homo sapiens
  source 1..30: mol_type = unassigned DNA
agtcaatgttatttctggaactggtcatca

SEQ ID NO: 505 - DNA, 30 bp, Homo sapiens
  source 1..30: mol_type = unassigned DNA
aaatgtgctaaccatgatgggactgaggag

SEQ ID NO: 506 - DNA, 30 bp, Homo sapiens
  source 1..30: mol_type = unassigned DNA
gaaatgtgctaaccatgatgggactgagga

SEQ ID NO: 507 - DNA, 30 bp, Homo sapiens
  source 1..30: mol_type = unassigned DNA
tgaaatgtgctaaccatgatgggactgagg

SEQ ID NO: 508 - DNA, 30 bp, Homo sapiens
  source 1..30: mol_type = unassigned DNA
aggaggcattttgaaatgtgctaaccatga

SEQ ID NO: 509 - DNA, 30 bp, Homo sapiens
  source 1..30: mol_type = unassigned DNA
aaactaaatatctctggcctatggaagtag

SEQ ID NO: 510 - DNA, 30 bp, Homo sapiens
  source 1..30: mol_type = unassigned DNA
aacaaaatgttaaaactaaatatctctggc

SEQ ID NO: 511 - DNA, 30 bp, Homo sapiens
  source 1..30: mol_type = unassigned DNA
ttcaacaaaatgttaaaactaaatatctct

SEQ ID NO: 512 - DNA, 30 bp, Homo sapiens
  source 1..30: mol_type = unassigned DNA
attcaacaaaatgttaaaactaaatatctc

SEQ ID NO: 513 - DNA, 30 bp, Homo sapiens
  source 1..30: mol_type = unassigned DNA
tattcaacaaaatgttaaaactaaatatct

SEQ ID NO: 514 - DNA, 30 bp, Homo sapiens
  source 1..30: mol_type = unassigned DNA
ttttattcaacaaaatgttaaaactaaata

SEQ ID NO: 515 - DNA, 30 bp, Homo sapiens
  source 1..30: mol_type = unassigned DNA
attttattcaacaaaatgttaaaactaaat

SEQ ID NO: 516 - DNA, 30 bp, Homo sapiens
  source 1..30: mol_type = unassigned DNA
aatgtgaatgtgtaaatttattttattcaa

SEQ ID NO: 517 - DNA, 30 bp, Homo sapiens
  source 1..30: mol_type = unassigned DNA
tattaaatgtgaatgtgtaaatttatttta

SEQ ID NO: 518 - DNA, 30 bp, Homo sapiens
  source 1..30: mol_type = unassigned DNA
aaataacatctaatagttatattaaatgtg

SEQ ID NO: 519 - DNA, 30 bp, Homo sapiens
  source 1..30: mol_type = unassigned DNA
gaagtattttctcttcaaggtgagtctgtg

SEQ ID NO: 520 - DNA, 30 bp, Homo sapiens
  source 1..30: mol_type = unassigned DNA
atggtaatatgaagagaatcttgaaataac

SEQ ID NO: 521 - DNA, 30 bp, Homo sapiens
  source 1..30: mol_type = unassigned DNA
tctcttcaaggtgagtctgtgatcagaaag

SEQ ID NO: 522 - DNA, 30 bp, Homo sapiens
  source 1..30: mol_type = unassigned DNA
tcttcaaggtgagtctgtgatcagaaagga

SEQ ID NO: 523 - DNA, 30 bp, Homo sapiens
  source 1..30: mol_type = unassigned DNA
cgggaaaatgtttgagtaaagaaataggaa

SEQ ID NO: 524 - DNA, 30 bp, Homo sapiens
  source 1..30: mol_type = unassigned DNA
aaagaaagcaccattgcgggaaaatgtttg

SEQ ID NO: 525 - DNA, 30 bp, Homo sapiens
  source 1..30: mol_type = unassigned DNA
tgaatacaccagaaaaacagttgaaagaaa

SEQ ID NO: 526 - DNA, 30 bp, Homo sapiens
  source 1..30: mol_type = unassigned DNA
atgaatacaccagaaaaacagttgaaagaa

SEQ ID NO: 527 - DNA, 30 bp, Homo sapiens
  source 1..30: mol_type = unassigned DNA
ccatagagaatctggaatttatgaatacac

SEQ ID NO: 528 - DNA, 30 bp, Homo sapiens
  source 1..30: mol_type = unassigned DNA
cttcccatagagaatctggaatttatgaat

SEQ ID NO: 529 - DNA, 30 bp, Homo sapiens
  source 1..30: mol_type = unassigned DNA
aatcaatcaataaaagttacttcccataga

SEQ ID NO: 530 - DNA, 30 bp, Homo sapiens
  source 1..30: mol_type = unassigned DNA
tatgtgctatacaagggttaaatcaatcaa

SEQ ID NO: 531 - DNA, 30 bp, Homo sapiens
  source 1..30: mol_type = unassigned DNA
catgttatatgtgctatacaagggttaaat

SEQ ID NO: 532 - DNA, 30 bp, Homo sapiens
  source 1..30: mol_type = unassigned DNA
gaacaatgccttgcatgttatatgtgctat

SEQ ID NO: 533 - DNA, 30 bp, Homo sapiens
  source 1..30: mol_type = unassigned DNA
ttagaacaatgccttgcatgttatatgtgc

SEQ ID NO: 534 - DNA, 30 bp, Homo sapiens
  source 1..30: mol_type = unassigned DNA
atatgtggaaagttcttagaacaatgcctt

SEQ ID NO: 535 - DNA, 30 bp, Homo sapiens
  source 1..30: mol_type = unassigned DNA
acacagttaatatgtggaaagttcttagaa

SEQ ID NO: 536 - DNA, 30 bp, Homo sapiens
  source 1..30: mol_type = unassigned DNA
agtgattaacacagttaatatgtggaaagt

SEQ ID NO: 537 - DNA, 30 bp, Homo sapiens
  source 1..30: mol_type = unassigned DNA
ttaagtgattaacacagttaatatgtggaa

SEQ ID NO: 538 - DNA, 30 bp, Homo sapiens
  source 1..30: mol_type = unassigned DNA
ggattattaagtgattaacacagttaatat

SEQ ID NO: 539 - DNA, 30 bp, Homo sapiens
  source 1..30: mol_type = unassigned DNA
catatctgtaatagaacctacttaggatta

SEQ ID NO: 540 - DNA, 30 bp, Homo sapiens
  source 1..30: mol_type = unassigned DNA
ccatatctgtaatagaacctacttaggatt

SEQ ID NO: 541 - DNA, 30 bp, Homo sapiens
  source 1..30: mol_type = unassigned DNA
tgtgcctcagtttccatatctgtaatagaa

SEQ ID NO: 542 - DNA, 30 bp, Homo sapiens
  source 1..30: mol_type = unassigned DNA
ctgtgcctcagtttccatatctgtaataga

SEQ ID NO: 543 - DNA, 30 bp, Homo sapiens
  source 1..30: mol_type = unassigned DNA
aactttctgtgcctcagtttccatatctgt

SEQ ID NO: 544 - DNA, 30 bp, Homo sapiens
  source 1..30: mol_type = unassigned DNA
agtaagatacttcaactttctgtgcctcag

SEQ ID NO: 545 - DNA, 30 bp, Homo sapiens
  source 1..30: mol_type = unassigned DNA
tggatctgactaactgtgtgaccttgagta

SEQ ID NO: 546 - DNA, 30 bp, Homo sapiens
  source 1..30: mol_type = unassigned DNA
cgaagccagatggcctgggcccaaattctg

SEQ ID NO: 547 - DNA, 30 bp, Homo sapiens
  source 1..30: mol_type = unassigned DNA
aataaaatggtgatatcacaggtgtgacct

SEQ ID NO: 548 - DNA, 30 bp, Homo sapiens
  source 1..30: mol_type = unassigned DNA
aaataaaatggtgatatcacaggtgtgacc

SEQ ID NO: 549 - DNA, 30 bp, Homo sapiens
  source 1..30: mol_type = unassigned DNA
aaggtgagtctgtgatcagaaaggagaaga

SEQ ID NO: 550 - DNA, 30 bp, Homo sapiens
  source 1..30: mol_type = unassigned DNA
ctcttcaaggtgagtctgtgatcagaaagg

SEQ ID NO: 551 - DNA, 30 bp, Homo sapiens
  source 1..30: mol_type = unassigned DNA
gatggtaatatgaagagaatcttgaaataa

SEQ ID NO: 552 - DNA, 30 bp, Homo sapiens
  source 1..30: mol_type = unassigned DNA
tctcctgcctgcctgcctgctttgatggta

SEQ ID NO: 553 - DNA, 30 bp, Homo sapiens
  source 1..30: mol_type = unassigned DNA
ctacagttctctcctgcctgcctgcctgct

SEQ ID NO: 554 - DNA, 30 bp, Homo sapiens
  source 1..30: mol_type = unassigned DNA
ttgttatggttttatagtataatatgtggc

SEQ ID NO: 555 - DNA, 30 bp, Homo sapiens
  source 1..30: mol_type = unassigned DNA
aaatatttttgttatggttttatagtataa

SEQ ID NO: 556 - DNA, 30 bp, Homo sapiens
  source 1..30: mol_type = unassigned DNA
ctctggaggtcaacaacaagtgagaacaaa

SEQ ID NO: 557 - DNA, 30 bp, Homo sapiens
  source 1..30: mol_type = unassigned DNA
actctggaggtcaacaacaagtgagaacaa

SEQ ID NO: 558 - DNA, 30 bp, Homo sapiens
  source 1..30: mol_type = unassigned DNA
tactctggaggtcaacaacaagtgagaaca

SEQ ID NO: 559 - DNA, 30 bp, Homo sapiens
  source 1..30: mol_type = unassigned DNA
aatattttactctggaggtcaacaacaagt

SEQ ID NO: 560 - DNA, 30 bp, Homo sapiens
  source 1..30: mol_type = unassigned DNA
cagagtattaaatattttactctggaggtc

SEQ ID NO: 561 - DNA, 30 bp, Homo sapiens
  source 1..30: mol_type = unassigned DNA
ccagagtattaaatattttactctggaggt

SEQ ID NO: 562 - DNA, 30 bp, Homo sapiens
  source 1..30: mol_type = unassigned DNA
aaacccataactttccagagtattaaatat

SEQ ID NO: 563 - DNA, 30 bp, Homo sapiens
  source 1..30: mol_type = unassigned DNA
gaaacccataactttccagagtattaaata

SEQ ID NO: 564 - DNA, 30 bp, Homo sapiens
  source 1..30: mol_type = unassigned DNA
tgaaacccataactttccagagtattaaat

SEQ ID NO: 565 - DNA, 30 bp, Homo sapiens
  source 1..30: mol_type = unassigned DNA
ccataaaataaattttgaaacccataactt

SEQ ID NO: 566 - DNA, 30 bp, Homo sapiens
  source 1..30: mol_type = unassigned DNA
ttgccataaaataaattttgaaacccataa

SEQ ID NO: 567 - DNA, 30 bp, Homo sapiens
  source 1..30: mol_type = unassigned DNA
cttgccataaaataaattttgaaacccata

SEQ ID NO: 568 - DNA, 30 bp, Homo sapiens
  source 1..30: mol_type = unassigned DNA
tctatttcttgccataaaataaattttgaa

SEQ ID NO: 569 - DNA, 30 bp, Homo sapiens
  source 1..30: mol_type = unassigned DNA
aatgtgctctatgagaactgtaattatcta

SEQ ID NO: 570 - DNA, 30 bp, Homo sapiens
  source 1..30: mol_type = unassigned DNA
aaatgtgctctatgagaactgtaattatct

SEQ ID NO: 571 - DNA, 30 bp, Homo sapiens
  source 1..30: mol_type = unassigned DNA
taaatgtgctctatgagaactgtaattatc

SEQ ID NO: 572 - DNA, 30 bp, Homo sapiens
  source 1..30: mol_type = unassigned DNA
ttttaaatgtgctctatgagaactgtaatt

SEQ ID NO: 573 - DNA, 30 bp, Homo sapiens
  source 1..30: mol_type = unassigned DNA
ccctataaaaataaattattttaaatgtgc

SEQ ID NO: 574 - DNA, 30 bp, Homo sapiens
  source 1..30: mol_type = unassigned DNA
gccctataaaaataaattattttaaatgtg

SEQ ID NO: 575 - DNA, 30 bp, Homo sapiens
  source 1..30: mol_type = unassigned DNA
tgccctataaaaataaattattttaaatgt

SEQ ID NO: 576 - DNA, 30 bp, Homo sapiens
  source 1..30: mol_type = unassigned DNA
ttgccctataaaaataaattattttaaatg

SEQ ID NO: 577 - DNA, 30 bp, Homo sapiens
  source 1..30: mol_type = unassigned DNA
agtcctaggcaatatttttgccctataaaa

SEQ ID NO: 578 - DNA, 30 bp, Homo sapiens
  source 1..30: mol_type = unassigned DNA
taaaaaaaaaaaaatcattcagtcctaggc

SEQ ID NO: 579 - DNA, 30 bp, Homo sapiens
  source 1..30: mol_type = unassigned DNA
gtaaaaaaaaaaaaatcattcagtcctagg

SEQ ID NO: 580 - DNA, 30 bp, Homo sapiens
  source 1..30: mol_type = unassigned DNA
caatctttgtaaaaaaaaaaaaatcattca

SEQ ID NO: 581 - DNA, 30 bp, Homo sapiens
  source 1..30: mol_type = unassigned DNA
tgttatggttttatagtataatatgtggct

SEQ ID NO: 582 - DNA, 30 bp, Homo sapiens
  source 1..30: mol_type = unassigned DNA
gttatggttttatagtataatatgtggctc

SEQ ID NO: 583 - DNA, 30 bp, Homo sapiens
  source 1..30: mol_type = unassigned DNA
ttatggttttatagtataatatgtggctcc

SEQ ID NO: 584 - DNA, 30 bp, Homo sapiens
  source 1..30: mol_type = unassigned DNA
tggttttatagtataatatgtggctcctac

SEQ ID NO: 585 - DNA, 30 bp, Homo sapiens
  source 1..30: mol_type = unassigned DNA
aaaaccttcctacagttctctcctgcctgc

SEQ ID NO: 586 - DNA, 30 bp, Homo sapiens
  source 1..30: mol_type = unassigned DNA
acaagggattcaaaaccttcctacagttct

SEQ ID NO: 587 - DNA, 30 bp, Homo sapiens
  source 1..30: mol_type = unassigned DNA
cacaagggattcaaaaccttcctacagttc

SEQ ID NO: 588 - DNA, 30 bp, Homo sapiens
  source 1..30: mol_type = unassigned DNA
aaaatgtttcacaagggattcaaaaccttc

SEQ ID NO: 589 - DNA, 30 bp, Homo sapiens
  source 1..30: mol_type = unassigned DNA
aaagataattaaaaatgtttcacaagggat

SEQ ID NO: 590 - DNA, 30 bp, Homo sapiens
  source 1..30: mol_type = unassigned DNA
ttaaaagataattaaaaatgtttcacaagg

SEQ ID NO: 591 - DNA, 30 bp, Homo sapiens
  source 1..30: mol_type = unassigned DNA
attaaaagataattaaaaatgtttcacaag

SEQ ID NO: 592 - DNA, 30 bp, Homo sapiens
  source 1..30: mol_type = unassigned DNA
ctttattaaaagataattaaaaatgtttca

SEQ ID NO: 593 - DNA, 30 bp, Homo sapiens
  source 1..30: mol_type = unassigned DNA
acaaatgacagggcctgattcctttattaa

SEQ ID NO: 594 - DNA, 30 bp, Homo sapiens
  source 1..30: mol_type = unassigned DNA
ctactgcaaatgtctccttgacaaatgaca

SEQ ID NO: 595 - DNA, 30 bp, Homo sapiens
  source 1..30: mol_type = unassigned DNA
actactgcaaatgtctccttgacaaatgac

SEQ ID NO: 596 - DNA, 30 bp, Homo sapiens
  source 1..30: mol_type = unassigned DNA
taaacacaagctttactactgcaaatgtct

SEQ ID NO: 597 - DNA, 30 bp, Homo sapiens
  source 1..30: mol_type = unassigned DNA
atcatgactaataaaaatggatattataaa

SEQ ID NO: 598 - DNA, 30 bp, Homo sapiens
  source 1..30: mol_type = unassigned DNA
gagtaaagaaataggaagacttattggctc

SEQ ID NO: 599 - DNA, 30 bp, Homo sapiens
  source 1..30: mol_type = unassigned DNA
aatcatgactaataaaaatggatattataa

SEQ ID NO: 600 - DNA, 30 bp, Homo sapiens
  source 1..30: mol_type = unassigned DNA
tgagaacaaatgtacacaaatgttatcttt

SEQ ID NO: 601 - DNA, 30 bp, Homo sapiens
  source 1..30: mol_type = unassigned DNA
gtgagaacaaatgtacacaaatgttatctt

SEQ ID NO: 602 - DNA, 30 bp, Homo sapiens
  source 1..30: mol_type = unassigned DNA
tgtgagaacaaatgtacacaaatgttatct

SEQ ID NO: 603 - DNA, 30 bp, Homo sapiens
  source 1..30: mol_type = unassigned DNA
cactcatataaaagtgttttgtgagaacaa

SEQ ID NO: 604 - DNA, 30 bp, Homo sapiens
  source 1..30: mol_type = unassigned DNA
acactcatataaaagtgttttgtgagaaca

SEQ ID NO: 605 - DNA, 30 bp, Homo sapiens
  source 1..30: mol_type = unassigned DNA
acctttacactcatataaaagtgttttgtg

SEQ ID NO: 606 - DNA, 30 bp, Homo sapiens
  source 1..30: mol_type = unassigned DNA
attaacctttacactcatataaaagtgttt

SEQ ID NO: 607 - DNA, 30 bp, Homo sapiens
  source 1..30: mol_type = unassigned DNA
cacatgaccagcaaaatgatggctgaaatg

SEQ ID NO: 608 - DNA, 30 bp, Homo sapiens
  source 1..30: mol_type = unassigned DNA
ccacatgaccagcaaaatgatggctgaaat

SEQ ID NO: 609 - DNA, 30 bp, Homo sapiens
  source 1..30: mol_type = unassigned DNA
ctaaagaagctatatttccacatgaccagc

SEQ ID NO: 610 - DNA, 30 bp, Homo sapiens
  source 1..30: mol_type = unassigned DNA
tagtataatatgtggctcctactctaagta

SEQ ID NO: 611 - DNA, 30 bp, Homo sapiens
  source 1..30: mol_type = unassigned DNA
atagtataatatgtggctcctactctaagt

SEQ ID NO: 612 - DNA, 30 bp, Homo sapiens
  source 1..30: mol_type = unassigned DNA
tatagtataatatgtggctcctactctaag

SEQ ID NO: 613 - DNA, 30 bp, Homo sapiens
  source 1..30: mol_type = unassigned DNA
tctttaatcatgactaataaaaatggatat

SEQ ID NO: 614 - DNA, 30 bp, Homo sapiens
  source 1..30: mol_type = unassigned DNA
agtaaagaaataggaagacttattggctcg

SEQ ID NO: 615 - DNA, 30 bp, Homo sapiens
  source 1..30: mol_type = unassigned DNA
ttggctcgaggccctcaagtttagattttt

SEQ ID NO: 616 - DNA, 30 bp, Homo sapiens
  source 1..30: mol_type = unassigned DNA
gctcgaggccctcaagtttagatttttgtc

SEQ ID NO: 617 - DNA, 30 bp, Homo sapiens
  source 1..30: mol_type = unassigned DNA
ttttaatttcttcagtattgctattcataa

SEQ ID NO: 618 - DNA, 30 bp, Homo sapiens
  source 1..30: mol_type = unassigned DNA
gttttaatttcttcagtattgctattcata

SEQ ID NO: 619 - DNA, 30 bp, Homo sapiens
  source 1..30: mol_type = unassigned DNA
tgttttaatttcttcagtattgctattcat

SEQ ID NO: 620 - DNA, 30 bp, Homo sapiens
  source 1..30: mol_type = unassigned DNA
agacagcaatcttttgttttaatttcttca

SEQ ID NO: 621 - DNA, 30 bp, Homo sapiens
  source 1..30: mol_type = unassigned DNA
gtaaataataaatataagatatattgagac

SEQ ID NO: 622 - DNA, 30 bp, Homo sapiens
  source 1..30: mol_type = unassigned DNA
ggtaaataataaatataagatatattgaga

SEQ ID NO: 623 - DNA, 30 bp, Homo sapiens
  source 1..30: mol_type = unassigned DNA
gaataatttggtaaataataaatataagat

SEQ ID NO: 624 - DNA, 30 bp, Homo sapiens
  source 1..30: mol_type = unassigned DNA
aggaagaaatactcttagaataatttggta

SEQ ID NO: 625 - DNA, 30 bp, Homo sapiens
  source 1..30: mol_type = unassigned DNA
tcacatggtattcaggaagaaatactctta

SEQ ID NO: 626 - DNA, 30 bp, Homo sapiens
  source 1..30: mol_type = unassigned DNA
ctcacatggtattcaggaagaaatactctt

SEQ ID NO: 627 - DNA, 30 bp, Homo sapiens
  source 1..30: mol_type = unassigned DNA
tctcacatggtattcaggaagaaatactct

SEQ ID NO: 628 - DNA, 30 bp, Homo sapiens
  source 1..30: mol_type = unassigned DNA
agaattttctcacatggtattcaggaagaa

SEQ ID NO: 629 - DNA, 30 bp, Homo sapiens
  source 1..30: mol_type = unassigned DNA
ttaagaattttctcacatggtattcaggaa

SEQ ID NO: 630 - DNA, 30 bp, Homo sapiens
  source 1..30: mol_type = unassigned DNA
aaatatacagtcatactcaataaattctta

SEQ ID NO: 631 - DNA, 30 bp, Homo sapiens
  source 1..30: mol_type = unassigned DNA
caaatatacagtcatactcaataaattctt

SEQ ID NO: 632 - DNA, 30 bp, Homo sapiens
  source 1..30: mol_type = unassigned DNA
tcaaatatacagtcatactcaataaattct

SEQ ID NO: 633 - DNA, 30 bp, Homo sapiens
  source 1..30: mol_type = unassigned DNA
gataagcagaagaaaacactcttttcaaat

SEQ ID NO: 634 - DNA, 30 bp, Homo sapiens
  source 1..30: mol_type = unassigned DNA
gcttagataagcagaagaaaacactctttt

SEQ ID NO: 635 - DNA, 30 bp, Homo sapiens
  source 1..30: mol_type = unassigned DNA
ttggcttagataagcagaagaaaacactct

SEQ ID NO: 636 - DNA, 30 bp, Homo sapiens
  source 1..30: mol_type = unassigned DNA
attggcttagataagcagaagaaaacactc

SEQ ID NO: 637 - DNA, 30 bp, Homo sapiens
  source 1..30: mol_type = unassigned DNA
aataatgaagatcctttattggcttagata

SEQ ID NO: 638 - DNA, 30 bp, Homo sapiens
  source 1..30: mol_type = unassigned DNA
gaattgaataatgaagatcctttattggct

SEQ ID NO: 639 - DNA, 30 bp, Homo sapiens
  source 1..30: mol_type = unassigned DNA
gaaagttagaattgaataatgaagatcctt

SEQ ID NO: 640 - DNA, 30 bp, Homo sapiens
  source 1..30: mol_type = unassigned DNA
cttagaaagttagaattgaataatgaagat

SEQ ID NO: 641 - DNA, 30 bp, Homo sapiens
  source 1..30: mol_type = unassigned DNA
acttccttagaaagttagaattgaataatg

SEQ ID NO: 642 - DNA, 30 bp, Homo sapiens
  source 1..30: mol_type = unassigned DNA
tgatctgtaggttgacttccttagaaagtt

SEQ ID NO: 643 - DNA, 30 bp, Homo sapiens
  source 1..30: mol_type = unassigned DNA
ctgatctgtaggttgacttccttagaaagt

SEQ ID NO: 644 - DNA, 30 bp, Homo sapiens
  source 1..30: mol_type = unassigned DNA
taatttcttcagtattgctattcataaatg

SEQ ID NO: 645 - DNA, 30 bp, Homo sapiens
  source 1..30: mol_type = unassigned DNA
aatttcttcagtattgctattcataaatga

SEQ ID NO: 646 - DNA, 30 bp, Homo sapiens
  source 1..30: mol_type = unassigned DNA
atttcttcagtattgctattcataaatgat

SEQ ID NO: 647 - DNA, 30 bp, Homo sapiens
  source 1..30: mol_type = unassigned DNA
cttcagtattgctattcataaatgatagta

SEQ ID NO: 648 - DNA, 30 bp, Homo sapiens
  source 1..30: mol_type = unassigned DNA
agagagagtgatggggcagaacacataatt

SEQ ID NO: 649 - DNA, 30 bp, Homo sapiens
  source 1..30: mol_type = unassigned DNA
aaaatccaattaagagagagtgatggggca

SEQ ID NO: 650 - DNA, 30 bp, Homo sapiens
  source 1..30: mol_type = unassigned DNA
aaaaatccaattaagagagagtgatggggc

SEQ ID NO: 651 - DNA, 30 bp, Homo sapiens
  source 1..30: mol_type = unassigned DNA
taaaaatccaattaagagagagtgatgggg

SEQ ID NO: 652 - DNA, 30 bp, Homo sapiens
  source 1..30: mol_type = unassigned DNA
tgccgagtcctgcaatatgaatataatttt

SEQ ID NO: 653 - DNA, 30 bp, Homo sapiens
  source 1..30: mol_type = unassigned DNA
tctcgaaggtcttctgccgagtcctgcaat

SEQ ID NO: 654 - DNA, 30 bp, Homo sapiens
  source 1..30: mol_type = unassigned DNA
ctctcgaaggtcttctgccgagtcctgcaa

SEQ ID NO: 655 - DNA, 30 bp, Homo sapiens
  source 1..30: mol_type = unassigned DNA
tacctttctctcgaaggtcttctgccgagt

SEQ ID NO: 656 - DNA, 30 bp, Homo sapiens
  source 1..30: mol_type = unassigned DNA
ctacctttctctcgaaggtcttctgccgag

SEQ ID NO: 657 - DNA, 30 bp, Homo sapiens
  source 1..30: mol_type = unassigned DNA
tctacctttctctcgaaggtcttctgccga

SEQ ID NO: 658 - DNA, 30 bp, Homo sapiens
  source 1..30: mol_type = unassigned DNA
ttttctacctttctctcgaaggtcttctgc

SEQ ID NO: 659 - DNA, 30 bp, Homo sapiens
  source 1..30: mol_type = unassigned DNA
ttattttctacctttctctcgaaggtcttc

SEQ ID NO: 660 - DNA, 30 bp, Homo sapiens
  source 1..30: mol_type = unassigned DNA
ggcaggctgtctgtctctctctctcgcaca

SEQ ID NO: 661 - DNA, 30 bp, Homo sapiens
  source 1..30: mol_type = unassigned DNA
aagatcctctttctgatctgtaggttgact

SEQ ID NO: 662 - DNA, 30 bp, Homo sapiens
  source 1..30: mol_type = unassigned DNA
ttaggcaggctgtctgtctctctctctcgc

SEQ ID NO: 663 - DNA, 30 bp, Homo sapiens
  source 1..30: mol_type = unassigned DNA
cttcttaggcaggctgtctgtctctctctc

SEQ ID NO: 664 - DNA, 30 bp, Homo sapiens
  source 1..30: mol_type = unassigned DNA
atttcttcttaggcaggctgtctgtctctc

SEQ ID NO: 665 - DNA, 30 bp, Homo sapiens
  source 1..30: mol_type = unassigned DNA
acattcatttcttcttaggcaggctgtctg

SEQ ID NO: 666 - DNA, 30 bp, Homo sapiens
  source 1..30: mol_type = unassigned DNA
tcaactgtgccacaagccgcattcacattc

SEQ ID NO: 667 - DNA, 30 bp, Homo sapiens
  source 1..30: mol_type = unassigned DNA
tcatccttgtcaactgtgccacaagccgca

SEQ ID NO: 668 - DNA, 30 bp, Homo sapiens
  source 1..30: mol_type = unassigned DNA
atcatccttgtcaactgtgccacaagccgc

SEQ ID NO: 669 - DNA, 30 bp, Homo sapiens
  source 1..30: mol_type = unassigned DNA
atttatcatccttgtcaactgtgccacaag

SEQ ID NO: 670 - DNA, 30 bp, Homo sapiens
  source 1..30: mol_type = unassigned DNA
ttgatttatcatccttgtcaactgtgccac

SEQ ID NO: 671 - DNA, 30 bp, Homo sapiens
  source 1..30: mol_type = unassigned DNA
cattattgatttatcatccttgtcaactgt

SEQ ID NO: 672 - DNA, 30 bp, Homo sapiens
  source 1..30: mol_type = unassigned DNA
ataaatgatagtaagcttgcattattgatt

SEQ ID NO: 673 - DNA, 30 bp, Homo sapiens
  source 1..30: mol_type = unassigned DNA
ctattcataaatgatagtaagcttgcatta

SEQ ID NO: 674 - DNA, 30 bp, Homo sapiens
  source 1..30: mol_type = unassigned DNA
agtattgctattcataaatgatagtaagct

SEQ ID NO: 675 - DNA, 30 bp, Homo sapiens
  source 1..30: mol_type = unassigned DNA
ttcagtattgctattcataaatgatagtaa

SEQ ID NO: 676 - DNA, 30 bp, Homo sapiens
  source 1..30: mol_type = unassigned DNA
ttcttaggcaggctgtctgtctctctctct

SEQ ID NO: 677 - DNA, 30 bp, Homo sapiens
  source 1..30: mol_type = unassigned DNA
acaatctttgtaaaaaaaaaaaaatcattc

SEQ ID NO: 678 - DNA, 30 bp, Homo sapiens
  source 1..30: mol_type = unassigned DNA
cttgaagatcctctttctgatctgtaggtt

SEQ ID NO: 679 - DNA, 30 bp, Homo sapiens
  source 1..30: mol_type = unassigned DNA
gatgctattccttgaagatcctctttctga

SEQ ID NO: 680 - DNA, 30 bp, Homo sapiens
  source 1..30: mol_type = unassigned DNA
gtccaactttgtgttgagtaacagtatatt

SEQ ID NO: 681 - DNA, 30 bp, Homo sapiens
  source 1..30: mol_type = unassigned DNA
agacttagtccaactttgtgttgagtaaca

SEQ ID NO: 682 - DNA, 30 bp, Homo sapiens
  source 1..30: mol_type = unassigned DNA
gagacttagtccaactttgtgttgagtaac

SEQ ID NO: 683 - DNA, 30 bp, Homo sapiens
  source 1..30: mol_type = unassigned DNA
acaacaactgaatggctaactttgagactt

SEQ ID NO: 684 - DNA, 30 bp, Homo sapiens
  source 1..30: mol_type = unassigned DNA
tgagagaccctgaaatgaactgttaacaac

SEQ ID NO: 685 - DNA, 30 bp, Homo sapiens
  source 1..30: mol_type = unassigned DNA
ccagcttctgagagaccctgaaatgaactg

SEQ ID NO: 686 - DNA, 30 bp, Homo sapiens
  source 1..30: mol_type = unassigned DNA
cccagcttctgagagaccctgaaatgaact

SEQ ID NO: 687 - DNA, 30 bp, Homo sapiens
  source 1..30: mol_type = unassigned DNA
caaaaatggaaagtttcccagcttctgaga

SEQ ID NO: 688 - DNA, 30 bp, Homo sapiens
  source 1..30: mol_type = unassigned DNA
aatgtacaagaaattgcaaaaatggaaagt

SEQ ID NO: 689 - DNA, 30 bp, Homo sapiens
  source 1..30: mol_type = unassigned DNA
cttcaatgtacaagaaattgcaaaaatgga

SEQ ID NO: 690 - DNA, 30 bp, Homo sapiens
  source 1..30: mol_type = unassigned DNA
ccttcaatgtacaagaaattgcaaaaatgg

SEQ ID NO: 691 - DNA, 30 bp, Homo sapiens
  source 1..30: mol_type = unassigned DNA
ctttccttcaatgtacaagaaattgcaaaa

SEQ ID NO: 692 - DNA, 30 bp, Homo sapiens
  source 1..30: mol_type = unassigned DNA
agtgtgtcttcctttccttcaatgtacaag

SEQ ID NO: 693 - DNA, 30 bp, Homo sapiens
  source 1..30: mol_type = unassigned DNA
taatgctgtcttaagtgtgtcttcctttcc

SEQ ID NO: 694 - DNA, 30 bp, Homo sapiens
  source 1..30: mol_type = unassigned DNA
gtaatgctgtcttaagtgtgtcttcctttc

SEQ ID NO: 695 - DNA, 30 bp, Homo sapiens
  source 1..30: mol_type = unassigned DNA
tgtaatgctgtcttaagtgtgtcttccttt

SEQ ID NO: 696 - DNA, 30 bp, Homo sapiens
  source 1..30: mol_type = unassigned DNA
cttttgtaatgctgtcttaagtgtgtcttc

SEQ ID NO: 697 - DNA, 30 bp, Homo sapiens
  source 1..30: mol_type = unassigned DNA
aaacatgaattacttttgtaatgctgtctt

SEQ ID NO: 698 - DNA, 30 bp, Homo sapiens
  source 1..30: mol_type = unassigned DNA
aaaacatgaattacttttgtaatgctgtct

SEQ ID NO: 699 - DNA, 30 bp, Homo sapiens
  source 1..30: mol_type = unassigned DNA
aacatttaaaacatgaattacttttgtaat

SEQ ID NO: 700 - DNA, 30 bp, Homo sapiens
  source 1..30: mol_type = unassigned DNA
tacagagagccctgcccgactgccagaatt

SEQ ID NO: 701 - DNA, 30 bp, Homo sapiens
  source 1..30: mol_type = unassigned DNA
tcatctccaaatgaggttatacagagagcc

SEQ ID NO: 702 - DNA, 30 bp, Homo sapiens
  source 1..30: mol_type = unassigned DNA
gtcatctccaaatgaggttatacagagagc

SEQ ID NO: 703 - DNA, 30 bp, Homo sapiens
  source 1..30: mol_type = unassigned DNA
tgtcatctccaaatgaggttatacagagag

SEQ ID NO: 704 - DNA, 30 bp, Homo sapiens
  source 1..30: mol_type = unassigned DNA
ttgtcatctccaaatgaggttatacagaga

SEQ ID NO: 705 - DNA, 30 bp, Homo sapiens
  source 1..30: mol_type = unassigned DNA
gatttttgtcatctccaaatgaggttatac

SEQ ID NO: 706 - DNA, 30 bp, Homo sapiens
  source 1..30: mol_type = unassigned DNA
agatttttgtcatctccaaatgaggttata

SEQ ID NO: 707 - DNA, 30 bp, Homo sapiens
  source 1..30: mol_type = unassigned DNA
gtgttgagtaacagtatattctgcaaaccc

SEQ ID NO: 708 - DNA, 30 bp, Homo sapiens
  source 1..30: mol_type = unassigned DNA
tgttgagtaacagtatattctgcaaaccct

SEQ ID NO: 709 - DNA, 30 bp, Homo sapiens
  source 1..30: mol_type = unassigned DNA
agtaacagtatattctgcaaaccctgaagc

SEQ ID NO: 710 - DNA, 30 bp, Homo sapiens
  source 1..30: mol_type = unassigned DNA
tgcaaaccctgaagctagttttatttggga

SEQ ID NO: 711 - DNA, 30 bp, Homo sapiens
  source 1..30: mol_type = unassigned DNA
cagaaaggtggtaatggctgcatggtcagc

SEQ ID NO: 712 - DNA, 30 bp, Homo sapiens
  source 1..30: mol_type = unassigned DNA
ccagaaaggtggtaatggctgcatggtcag

SEQ ID NO: 713 - DNA, 30 bp, Homo sapiens
  source 1..30: mol_type = unassigned DNA
cagcataatatttccagaaaggtggtaatg

SEQ ID NO: 714 - DNA, 30 bp, Homo sapiens
  source 1..30: mol_type = unassigned DNA
gcagcataatatttccagaaaggtggtaat

SEQ ID NO: 715 - DNA, 30 bp, Homo sapiens
  source 1..30: mol_type = unassigned DNA
tgcagcataatatttccagaaaggtggtaa

SEQ ID NO: 716 - DNA, 30 bp, Homo sapiens
  source 1..30: mol_type = unassigned DNA
ttgcagcataatatttccagaaaggtggta

SEQ ID NO: 717 - DNA, 30 bp, Homo sapiens
  source 1..30: mol_type = unassigned DNA
tatcatttttgcagcataatatttccagaa

SEQ ID NO: 718 - DNA, 30 bp, Homo sapiens
  source 1..30: mol_type = unassigned DNA
gtgtattgtatcatttttgcagcataatat

SEQ ID NO: 719 - DNA, 30 bp, Homo sapiens
  source 1..30: mol_type = unassigned DNA
cgtgtattgtatcatttttgcagcataata

SEQ ID NO: 720 - DNA, 30 bp, Homo sapiens
  source 1..30: mol_type = unassigned DNA
agatatttcgtgtattgtatcatttttgca

SEQ ID NO: 721 - DNA, 30 bp, Homo sapiens
  source 1..30: mol_type = unassigned DNA
gagatatttcgtgtattgtatcatttttgc

SEQ ID NO: 722 - DNA, 30 bp, Homo sapiens
  source 1..30: mol_type = unassigned DNA
atttgagatatttcgtgtattgtatcattt

SEQ ID NO: 723 - DNA, 30 bp, Homo sapiens
  source 1..30: mol_type = unassigned DNA
aatttgagatatttcgtgtattgtatcatt

SEQ ID NO: 724 - DNA, 30 bp, Homo sapiens
  source 1..30: mol_type = unassigned DNA
atgctattccttgaagatcctctttctgat

SEQ ID NO: 725 - DNA, 30 bp, Homo sapiens
  source 1..30: mol_type = unassigned DNA
taatttgagatatttcgtgtattgtatcat

SEQ ID NO: 726 - DNA, 30 bp, Homo sapiens
  source 1..30: mol_type = unassigned DNA
tttaatttgagatatttcgtgtattgtatc

SEQ ID NO: 727 - DNA, 30 bp, Homo sapiens
  source 1..30: mol_type = unassigned DNA
tattttttaatttgagatatttcgtgtatt

SEQ ID NO: 728 - DNA, 30 bp, Homo sapiens
  source 1..30: mol_type = unassigned DNA
ggaaatgttatattttttaatttgagatat

SEQ ID NO: 729 - DNA, 30 bp, Homo sapiens
  source 1..30: mol_type = unassigned DNA
gggaaatgttatattttttaatttgagata

SEQ ID NO: 730 - DNA, 30 bp, Homo sapiens
  source 1..30: mol_type = unassigned DNA
gtgccctatttgggaaatgttatatttttt

SEQ ID NO: 731 - DNA, 30 bp, Homo sapiens
  source 1..30: mol_type = unassigned DNA
agtgccctatttgggaaatgttatattttt

SEQ ID NO: 732 - DNA, 30 bp, Homo sapiens
  source 1..30: mol_type = unassigned DNA
tagtgccctatttgggaaatgttatatttt

SEQ ID NO: 733 - DNA, 30 bp, Homo sapiens
  source 1..30: mol_type = unassigned DNA
ttagtgccctatttgggaaatgttatattt

SEQ ID NO: 734 - DNA, 30 bp, Homo sapiens
  source 1..30: mol_type = unassigned DNA
ggatcatgtttttagtgccctatttgggaa

SEQ ID NO: 735 - DNA, 30 bp, Homo sapiens
  source 1..30: mol_type = unassigned DNA
gggatcatgtttttagtgccctatttggga

SEQ ID NO: 736 - DNA, 30 bp, Homo sapiens
  source 1..30: mol_type = unassigned DNA
tttgggatcatgtttttagtgccctatttg

SEQ ID NO: 737 - DNA, 30 bp, Homo sapiens
  source 1..30: mol_type = unassigned DNA
atttgggatcatgtttttagtgccctattt

SEQ ID NO: 738 - DNA, 30 bp, Homo sapiens
  source 1..30: mol_type = unassigned DNA
tatttgggatcatgtttttagtgccctatt

SEQ ID NO: 739 - DNA, 30 bp, Homo sapiens
  source 1..30: mol_type = unassigned DNA
ttaatttgagatatttcgtgtattgtatca

SEQ ID NO: 740 - DNA, 30 bp, Homo sapiens
  source 1..30: mol_type = unassigned DNA
ccagagtaataaaatccccaggtatatgag

SEQ ID NO: 741 - DNA, 30 bp, Homo sapiens
  source 1..30: mol_type = unassigned DNA
ctttacaatctttgtaaaaaaaaaaaaatc

SEQ ID NO: 742 - DNA, 30 bp, Homo sapiens
  source 1..30: mol_type = unassigned DNA
cagaagaataactgctaaatgggcactctt

SEQ ID NO: 743 - DNA, 30 bp, Homo sapiens
  source 1..30: mol_type = unassigned DNA
tatttttgttctcataatacctggcacagg

SEQ ID NO: 744 - DNA, 30 bp, Homo sapiens
  source 1..30: mol_type = unassigned DNA
ttatttttgttctcataatacctggcacag

SEQ ID NO: 745 - DNA, 30 bp, Homo sapiens
  source 1..30: mol_type = unassigned DNA
tgcaaaagactaaatccaccaagggtgagg

SEQ ID NO: 746 - DNA, 30 bp, Homo sapiens
  source 1..30: mol_type = unassigned DNA
ctgcaaaagactaaatccaccaagggtgag

SEQ ID NO: 747 - DNA, 30 bp, Homo sapiens
  source 1..30: mol_type = unassigned DNA
tctgcaaaagactaaatccaccaagggtga

SEQ ID NO: 748 - DNA, 30 bp, Homo sapiens
  source 1..30: mol_type = unassigned DNA
ttctgcaaaagactaaatccaccaagggtg

SEQ ID NO: 749 - DNA, 30 bp, Homo sapiens
  source 1..30: mol_type = unassigned DNA
tttctgcaaaagactaaatccaccaagggt

SEQ ID NO: 750 - DNA, 30 bp, Homo sapiens
  source 1..30: mol_type = unassigned DNA
ttttctgcaaaagactaaatccaccaaggg

SEQ ID NO: 751 - DNA, 30 bp, Homo sapiens
  source 1..30: mol_type = unassigned DNA
tgacatgtacaggatctttttttctgcaaa

SEQ ID NO: 752 - DNA, 30 bp, Homo sapiens
  source 1..30: mol_type = unassigned DNA
ctgacatgtacaggatctttttttctgcaa

SEQ ID NO: 753 - DNA, 30 bp, Homo sapiens
  source 1..30: mol_type = unassigned DNA
aactttctgacatgtacaggatcttttttt

SEQ ID NO: 754 - DNA, 30 bp, Homo sapiens
  source 1..30: mol_type = unassigned DNA
ctattgaactttctgacatgtacaggatct

SEQ ID NO: 755 - DNA, 30 bp, Homo sapiens
  source 1..30: mol_type = unassigned DNA
ttactattgaactttctgacatgtacagga

SEQ ID NO: 756 - DNA, 30 bp, Homo sapiens
  source 1..30: mol_type = unassigned DNA
ccattattactattgaactttctgacatgt

SEQ ID NO: 757 - DNA, 30 bp, Homo sapiens
  source 1..30: mol_type = unassigned DNA
taaattaccattattactattgaactttct

SEQ ID NO: 758 - DNA, 30 bp, Homo sapiens
  source 1..30: mol_type = unassigned DNA
tagttataaattaccattattactattgaa

SEQ ID NO: 759 - DNA, 30 bp, Homo sapiens
  source 1..30: mol_type = unassigned DNA
atagttataaattaccattattactattga

SEQ ID NO: 760 - DNA, 30 bp, Homo sapiens
  source 1..30: mol_type = unassigned DNA
catttatagttataaattaccattattact

SEQ ID NO: 761 - DNA, 30 bp, Homo sapiens
  source 1..30: mol_type = unassigned DNA
tgagatggtgacttccatttatagttataa

SEQ ID NO: 762 - DNA, 30 bp, Homo sapiens
  source 1..30: mol_type = unassigned DNA
agatggtgaaattgtgagatggtgacttcc

SEQ ID NO: 763 - DNA, 30 bp, Homo sapiens
  source 1..30: mol_type = unassigned DNA
ttaagatggtgaaattgtgagatggtgact

SEQ ID NO: 764 - DNA, 30 bp, Homo sapiens
  source 1..30: mol_type = unassigned DNA
acaaaattgttaagatggtgaaattgtgag

SEQ ID NO: 765 - DNA, 30 bp, Homo sapiens
  source 1..30: mol_type = unassigned DNA
aacaaaattgttaagatggtgaaattgtga

SEQ ID NO: 766 - DNA, 30 bp, Homo sapiens
  source 1..30: mol_type = unassigned DNA
tagggcagtttaacaaaattgttaagatgg

SEQ ID NO: 767 - DNA, 30 bp, Homo sapiens
  source 1..30: mol_type = unassigned DNA
taatattgtagggcagtttaacaaaattgt

SEQ ID NO: 768 - DNA, 30 bp, Homo sapiens
  source 1..30: mol_type = unassigned DNA
tgtactatcttgtaatattgtagggcagtt

SEQ ID NO: 769 - DNA, 30 bp, Homo sapiens
  source 1..30: mol_type = unassigned DNA
ctagtgtatcattatgtactatcttgtaat

SEQ ID NO: 770 - DNA, 30 bp, Homo sapiens
  source 1..30: mol_type = unassigned DNA
atttttgttctcataatacctggcacaggc

SEQ ID NO: 771 - DNA, 30 bp, Homo sapiens
  source 1..30: mol_type = unassigned DNA
atgttactagtgtatcattatgtactatct

SEQ ID NO: 772 - DNA, 30 bp, Homo sapiens
  source 1..30: mol_type = unassigned DNA
tttttgttctcataatacctggcacaggct

SEQ ID NO: 773 - DNA, 30 bp, Homo sapiens
  source 1..30: mol_type = unassigned DNA
tgttctcataatacctggcacaggcttcag

SEQ ID NO: 774 - DNA, 30 bp, Homo sapiens
  source 1..30: mol_type = unassigned DNA
gataggtaaataatatacacaactttatta

SEQ ID NO: 775 - DNA, 30 bp, Homo sapiens
  source 1..30: mol_type = unassigned DNA
tgataggtaaataatatacacaactttatt

SEQ ID NO: 776 - DNA, 30 bp, Homo sapiens
  source 1..30: mol_type = unassigned DNA
catataaatattttgataggtaaataatat

SEQ ID NO: 777 - DNA, 30 bp, Homo sapiens
  source 1..30: mol_type = unassigned DNA
tatattacatataaatattttgataggtaa

SEQ ID NO: 778 - DNA, 30 bp, Homo sapiens
  source 1..30: mol_type = unassigned DNA
atatattacatataaatattttgataggta

SEQ ID NO: 779 - DNA, 30 bp, Homo sapiens
  source 1..30: mol_type = unassigned DNA
catgaatgtgtatatatgtatgaaataggc

SEQ ID NO: 780 - DNA, 30 bp, Homo sapiens
  source 1..30: mol_type = unassigned DNA
gcatgaatgtgtatatatgtatgaaatagg

SEQ ID NO: 781 - DNA, 30 bp, Homo sapiens
  source 1..30: mol_type = unassigned DNA
tgcatgaatgtgtatatatgtatgaaatag

SEQ ID NO: 782 - DNA, 30 bp, Homo sapiens
  source 1..30: mol_type = unassigned DNA
ttttgcatgaatgtgtatatatgtatgaaa

SEQ ID NO: 783 - DNA, 30 bp, Homo sapiens
  source 1..30: mol_type = unassigned DNA
caggacagtggagggagtgctaaaccttat

SEQ ID NO: 784 - DNA, 30 bp, Homo sapiens
  source 1..30: mol_type = unassigned DNA
ttacaggacagtggagggagtgctaaacct

SEQ ID NO: 785 - DNA, 30 bp, Homo sapiens
  source 1..30: mol_type = unassigned DNA
attacaggacagtggagggagtgctaaacc

SEQ ID NO: 786 - DNA, 30 bp, Homo sapiens
  source 1..30: mol_type = unassigned DNA
tattacaggacagtggagggagtgctaaac

SEQ ID NO: 787 - DNA, 30 bp, Homo sapiens
  source 1..30: mol_type = unassigned DNA
tcactgtgcatgttttattacaggacagtg

SEQ ID NO: 788 - DNA, 30 bp, Homo sapiens
  source 1..30: mol_type = unassigned DNA
aactgaagacaaatatgcctcgtgtatgac

SEQ ID NO: 789 - DNA, 30 bp, Homo sapiens
  source 1..30: mol_type = unassigned DNA
aaactgaagacaaatatgcctcgtgtatga

SEQ ID NO: 790 - DNA, 30 bp, Homo sapiens
  source 1..30: mol_type = unassigned DNA
gtgacactgactatcaatgactttaaactg

SEQ ID NO: 791 - DNA, 30 bp, Homo sapiens
  source 1..30: mol_type = unassigned DNA
gttagtgacactgactatcaatgactttaa

SEQ ID NO: 792 - DNA, 30 bp, Homo sapiens
  source 1..30: mol_type = unassigned DNA
agttagtgacactgactatcaatgacttta

SEQ ID NO: 793 - DNA, 30 bp, Homo sapiens
  source 1..30: mol_type = unassigned DNA
ctttagttagtgacactgactatcaatgac

SEQ ID NO: 794 - DNA, 30 bp, Homo sapiens
  source 1..30: mol_type = unassigned DNA
actttagttagtgacactgactatcaatga

SEQ ID NO: 795 - DNA, 30 bp, Homo sapiens
  source 1..30: mol_type = unassigned DNA
tactttagttagtgacactgactatcaatg

SEQ ID NO: 796 - DNA, 30 bp, Homo sapiens
  source 1..30: mol_type = unassigned DNA
gtgctccaatctattttactttagttagtg

SEQ ID NO: 797 - DNA, 30 bp, Homo sapiens
  source 1..30: mol_type = unassigned DNA
agaacaaagttggtgctccaatctatttta

SEQ ID NO: 798 - DNA, 30 bp, Homo sapiens
  source 1..30: mol_type = unassigned DNA
tcataatacctggcacaggcttcagaacaa

SEQ ID NO: 799 - DNA, 30 bp, Homo sapiens
  source 1..30: mol_type = unassigned DNA
ttctcataatacctggcacaggcttcagaa

SEQ ID NO: 800 - DNA, 30 bp, Homo sapiens
  source 1..30: mol_type = unassigned DNA
gttctcataatacctggcacaggcttcaga

SEQ ID NO: 801 - DNA, 30 bp, Homo sapiens
  source 1..30: mol_type = unassigned DNA
ttgttctcataatacctggcacaggcttca

SEQ ID NO: 802 - DNA, 30 bp, Homo sapiens
  source 1..30: mol_type = unassigned DNA
ctagttgatgttactagtgtatcattatgt

SEQ ID NO: 803 - DNA, 30 bp, Homo sapiens
  source 1..30: mol_type = unassigned DNA
gtacttcctagttgatgttactagtgtatc

SEQ ID NO: 804 - DNA, 30 bp, Homo sapiens
  source 1..30: mol_type = unassigned DNA
gtggatcttggtacttcctagttgatgtta

SEQ ID NO: 805 - DNA, 30 bp, Homo sapiens
  source 1..30: mol_type = unassigned DNA
actgagaatcagcagcgtttgaggagctag

SEQ ID NO: 806 - DNA, 30 bp, Homo sapiens
  source 1..30: mol_type = unassigned DNA
tactgagaatcagcagcgtttgaggagcta

SEQ ID NO: 807 - DNA, 30 bp, Homo sapiens
  source 1..30: mol_type = unassigned DNA
ccaaattttactgagaatcagcagcgtttg

SEQ ID NO: 808 - DNA, 30 bp, Homo sapiens
  source 1..30: mol_type = unassigned DNA
aaatgcttcccaaattttactgagaatcag

SEQ ID NO: 809 - DNA, 30 bp, Homo sapiens
  source 1..30: mol_type = unassigned DNA
attaaaatgcttcccaaattttactgagaa

SEQ ID NO: 810 - DNA, 30 bp, Homo sapiens
  source 1..30: mol_type = unassigned DNA
aattaaaatgcttcccaaattttactgaga

SEQ ID NO: 811 - DNA, 30 bp, Homo sapiens
  source 1..30: mol_type = unassigned DNA
tttaattaaaatgcttcccaaattttactg

SEQ ID NO: 812 - DNA, 30 bp, Homo sapiens
  source 1..30: mol_type = unassigned DNA
atgagtccatcaaccaatctggccagagaa

SEQ ID NO: 813 - DNA, 30 bp, Homo sapiens
  source 1..30: mol_type = unassigned DNA
aatgagtccatcaaccaatctggccagaga

SEQ ID NO: 814 - DNA, 30 bp, Homo sapiens
  source 1..30: mol_type = unassigned DNA
aatatttaatgagtccatcaaccaatctgg

SEQ ID NO: 815 - DNA, 30 bp, Homo sapiens
  source 1..30: mol_type = unassigned DNA
aaatatttaatgagtccatcaaccaatctg

SEQ ID NO: 816 - DNA, 30 bp, Homo sapiens
  source 1..30: mol_type = unassigned DNA
caagatagtacataatgatacactagtaac

SEQ ID NO: 817 - DNA, 30 bp, Homo sapiens
  source 1..30: mol_type = unassigned DNA
aactgccctacaatattacaagatagtaca

SEQ ID NO: 818 - DNA, 30 bp, Homo sapiens
  source 1..30: mol_type = unassigned DNA
ttaaactgccctacaatattacaagatagt

SEQ ID NO: 819 - DNA, 30 bp, Homo sapiens
  source 1..30: mol_type = unassigned DNA
gttaaactgccctacaatattacaagatag

SEQ ID NO: 820 - DNA, 30 bp, Homo sapiens
  source 1..30: mol_type = unassigned DNA
tgttaaactgccctacaatattacaagata

SEQ ID NO: 821 - DNA, 30 bp, Homo sapiens
  source 1..30: mol_type = unassigned DNA
acaattttgttaaactgccctacaatatta

SEQ ID NO: 822 - DNA, 30 bp, Homo sapiens
  source 1..30: mol_type = unassigned DNA
accatcttaacaattttgttaaactgccct

SEQ ID NO: 823 - DNA, 30 bp, Homo sapiens
  source 1..30: mol_type = unassigned DNA
caccatcttaacaattttgttaaactgccc

SEQ ID NO: 824 - DNA, 30 bp, Homo sapiens
  source 1..30: mol_type = unassigned DNA
taactataaatggaagtcaccatctcacaa

SEQ ID NO: 825 - DNA, 30 bp, Homo sapiens
  source 1..30: mol_type = unassigned DNA
ataactataaatggaagtcaccatctcaca

SEQ ID NO: 826 - DNA, 30 bp, Homo sapiens
  source 1..30: mol_type = unassigned DNA
aatagtaataatggtaatttataactataa

SEQ ID NO: 827 - DNA, 30 bp, Homo sapiens
  source 1..30: mol_type = unassigned DNA
cagaaaaaaagatcctgtacatgtcagaaa

SEQ ID NO: 828 - DNA, 30 bp, Homo sapiens
  source 1..30: mol_type = unassigned DNA
gcagaaaaaaagatcctgtacatgtcagaa

SEQ ID NO: 829 - DNA, 30 bp, Homo sapiens
  source 1..30: mol_type = unassigned DNA
tgcagaaaaaaagatcctgtacatgtcaga

SEQ ID NO: 830 - DNA, 30 bp, Homo sapiens
  source 1..30: mol_type = unassigned DNA
gtcttttgcagaaaaaaagatcctgtacat

SEQ ID NO: 831 - DNA, 30 bp, Homo sapiens
  source 1..30: mol_type = unassigned DNA
agtcttttgcagaaaaaaagatcctgtaca

SEQ ID NO: 832 - DNA, 30 bp, Homo sapiens
  source 1..30: mol_type = unassigned DNA
ctgagaatcagcagcgtttgaggagctagc

SEQ ID NO: 833 - DNA, 30 bp, Homo sapiens
  source 1..30: mol_type = unassigned DNA
gaggagctagcctccacccccagaggttct

SEQ ID NO: 834 - DNA, 30 bp, Homo sapiens
  source 1..30: mol_type = unassigned DNA
aggagctagcctccacccccagaggttctc

SEQ ID NO: 835 - DNA, 30 bp, Homo sapiens
  source 1..30: mol_type = unassigned DNA
tcactctattaggtctgaagcaggtcccat

SEQ ID NO: 836 - DNA, 30 bp, Homo sapiens
  source 1..30: mol_type = unassigned DNA
ggtggatcttggtacttcctagttgatgtt

SEQ ID NO: 837 - DNA, 30 bp, Homo sapiens
  source 1..30: mol_type = unassigned DNA
tggtggatcttggtacttcctagttgatgt

SEQ ID NO: 838 - DNA, 30 bp, Homo sapiens
  source 1..30: mol_type = unassigned DNA
agccttttggtggatcttggtacttcctag

SEQ ID NO: 839 - DNA, 30 bp, Homo sapiens
  source 1..30: mol_type = unassigned DNA
cagccttttggtggatcttggtacttccta

SEQ ID NO: 840 - DNA, 30 bp, Homo sapiens
  source 1..30: mol_type = unassigned DNA
tcagccttttggtggatcttggtacttcct

SEQ ID NO: 841 - DNA, 30 bp, Homo sapiens
  source 1..30: mol_type = unassigned DNA
ttcagccttttggtggatcttggtacttcc

SEQ ID NO: 842 - DNA, 30 bp, Homo sapiens
  source 1..30: mol_type = unassigned DNA
aatttttcagccttttggtggatcttggta

SEQ ID NO: 843 - DNA, 30 bp, Homo sapiens
  source 1..30: mol_type = unassigned DNA
aaatttttcagccttttggtggatcttggt

SEQ ID NO: 844 - DNA, 30 bp, Homo sapiens
  source 1..30: mol_type = unassigned DNA
aatatttaaatttttcagccttttggtgga

SEQ ID NO: 845 - DNA, 30 bp, Homo sapiens
  source 1..30: mol_type = unassigned DNA
atggactcattaaatatttaaatttttcag

SEQ ID NO: 846 - DNA, 30 bp, Homo sapiens
  source 1..30: mol_type = unassigned DNA
gttgatggactcattaaatatttaaatttt

SEQ ID NO: 847 - DNA, 30 bp, Homo sapiens
  source 1..30: mol_type = unassigned DNA
tctggccagattggttgatggactcattaa

SEQ ID NO: 848 - DNA, 30 bp, Homo sapiens
  source 1..30: mol_type = unassigned DNA
aagaattctctggccagattggttgatgga

SEQ ID NO: 849 - DNA, 30 bp, Homo sapiens
  source 1..30: mol_type = unassigned DNA
ataggtaaataatatacacaactttattat

SEQ ID NO: 850 - DNA, 30 bp, Homo sapiens
  source 1..30: mol_type = unassigned DNA
attaaagaattctctggccagattggttga

SEQ ID NO: 851 - DNA, 30 bp, Homo sapiens
  source 1..30: mol_type = unassigned DNA
taattaaagaattctctggccagattggtt

SEQ ID NO: 852 - DNA, 30 bp, Homo sapiens
  source 1..30: mol_type = unassigned DNA
ggaagcattttaattaaagaattctctggc

SEQ ID NO: 853 - DNA, 30 bp, Homo sapiens
  source 1..30: mol_type = unassigned DNA
gggaagcattttaattaaagaattctctgg

SEQ ID NO: 854 - DNA, 30 bp, Homo sapiens
  source 1..30: mol_type = unassigned DNA
tcagtaaaatttgggaagcattttaattaa

SEQ ID NO: 855 - DNA, 30 bp, Homo sapiens
  source 1..30: mol_type = unassigned DNA
agacctaatagagtgagaacctctgggggt

SEQ ID NO: 856 - DNA, 30 bp, Homo sapiens
  source 1..30: mol_type = unassigned DNA
gaaatgcaaatccatgggacctgcttcaga

SEQ ID NO: 857 - DNA, 30 bp, Homo sapiens
  source 1..30: mol_type = unassigned DNA
ttagaaatgcaaatccatgggacctgcttc

SEQ ID NO: 858 - DNA, 30 bp, Homo sapiens
  source 1..30: mol_type = unassigned DNA
tgaatcagcctcatcagcaccacctgggag

SEQ ID NO: 859 - DNA, 30 bp, Homo sapiens
  source 1..30: mol_type = unassigned DNA
taacaagctcccaggtggtgctgatgaggc

SEQ ID NO: 860 - DNA, 30 bp, Homo sapiens
  source 1..30: mol_type = unassigned DNA
ctaacaagctcccaggtggtgctgatgagg

SEQ ID NO: 861 - DNA, 30 bp, Homo sapiens
  source 1..30: mol_type = unassigned DNA
catttctaacaagctcccaggtggtgctga

SEQ ID NO: 862 - DNA, 30 bp, Homo sapiens
  source 1..30: mol_type = unassigned DNA
gcatttctaacaagctcccaggtggtgctg

SEQ ID NO: 863 - DNA, 30 bp, Homo sapiens
  source 1..30: mol_type = unassigned DNA
ggtctgaagcaggtcccatggatttgcatt

SEQ ID NO: 864 - DNA, 30 bp, Homo sapiens
  source 1..30: mol_type = unassigned DNA
aattaaagaattctctggccagattggttg

SEQ ID NO: 865 - DNA, 30 bp, Homo sapiens
  source 1..30: mol_type = unassigned DNA
attatatgtaatatatatattatatgttat

SEQ ID NO: 866 - DNA, 30 bp, Homo sapiens
  source 1..30: mol_type = unassigned DNA
ttatatgtaatatatatattatatgttata

SEQ ID NO: 867 - DNA, 30 bp, Homo sapiens
  source 1..30: mol_type = unassigned DNA
tatgtaatatatatattatatgttataata

SEQ ID NO: 868 - DNA, 30 bp, Homo sapiens
  source 1..30: mol_type = unassigned DNA
ttaatggaagttaaactttatggctgcatt

SEQ ID NO: 869 - DNA, 30 bp, Homo sapiens
  source 1..30: mol_type = unassigned DNA
gttaatggaagttaaactttatggctgcat

SEQ ID NO: 870 - DNA, 30 bp, Homo sapiens
  source 1..30: mol_type = unassigned DNA
ctgtgagcagctttgttaatggaagttaaa

SEQ ID NO: 871 - DNA, 30 bp, Homo sapiens
  source 1..30: mol_type = unassigned DNA
actgtgagcagctttgttaatggaagttaa

SEQ ID NO: 872 - DNA, 30 bp, Homo sapiens
  source 1..30: mol_type = unassigned DNA
taataggtttactgtgagcagctttgttaa

SEQ ID NO: 873 - DNA, 30 bp, Homo sapiens
  source 1..30: mol_type = unassigned DNA
ttataataggtttactgtgagcagctttgt

SEQ ID NO: 874 - DNA, 30 bp, Homo sapiens
  source 1..30: mol_type = unassigned DNA
ctcctcactaggaagcccaaactgggaaac

SEQ ID NO: 875 - DNA, 30 bp, Homo sapiens
  source 1..30: mol_type = unassigned DNA
ggttgctcctcactaggaagcccaaactgg

SEQ ID NO: 876 - DNA, 30 bp, Homo sapiens
  source 1..30: mol_type = unassigned DNA
gtgtgagttaggttgctcctcactaggaag

SEQ ID NO: 877 - DNA, 30 bp, Homo sapiens
  source 1..30: mol_type = unassigned DNA
cgtgtgagttaggttgctcctcactaggaa

SEQ ID NO: 878 - DNA, 30 bp, Homo sapiens
  source 1..30: mol_type = unassigned DNA
tttcgtgtgagttaggttgctcctcactag

SEQ ID NO: 879 - DNA, 30 bp, Homo sapiens
  source 1..30: mol_type = unassigned DNA
gggttgtttcgtgtgagttaggttgctcct

SEQ ID NO: 880 - DNA, 30 bp, Homo sapiens
  source 1..30: mol_type = unassigned DNA
taagttggggttgtttcgtgtgagttaggt

SEQ ID NO: 881 - DNA, 30 bp, Homo sapiens
  source 1..30: mol_type = unassigned DNA
taacagtcaatatattataagttggggttg

SEQ ID NO: 882 - DNA, 30 bp, Homo sapiens
  source 1..30: mol_type = unassigned DNA
gtaacagtcaatatattataagttggggtt

SEQ ID NO: 883 - DNA, 30 bp, Homo sapiens
  source 1..30: mol_type = unassigned DNA
tgtaacagtcaatatattataagttggggt

SEQ ID NO: 884 - DNA, 30 bp, Homo sapiens
  source 1..30: mol_type = unassigned DNA
tggtctcagttttgtaacagtcaatatatt

SEQ ID NO: 885 - DNA, 30 bp, Homo sapiens
  source 1..30: mol_type = unassigned DNA
ctggtctcagttttgtaacagtcaatatat

SEQ ID NO: 886 - DNA, 30 bp, Homo sapiens
  source 1..30: mol_type = unassigned DNA
tctggtctcagttttgtaacagtcaatata

SEQ ID NO: 887 - DNA, 30 bp, Homo sapiens
  source 1..30: mol_type = unassigned DNA
atgggattttctggtctcagttttgtaaca

SEQ ID NO: 888 - DNA, 30 bp, Homo sapiens
  source 1..30: mol_type = unassigned DNA
ccgagagtctggaaatgataacagtaccat

SEQ ID NO: 889 - DNA, 30 bp, Homo sapiens
  source 1..30: mol_type = unassigned DNA
ttcccgagagtctggaaatgataacagtac

SEQ ID NO: 890 - DNA, 30 bp, Homo sapiens
  source 1..30: mol_type = unassigned DNA
atgttcttcccgagagtctggaaatgataa

SEQ ID NO: 891 - DNA, 30 bp, Homo sapiens
  source 1..30: mol_type = unassigned DNA
ccagggaggctgcaataagtctatcctaaa

SEQ ID NO: 892 - DNA, 30 bp, Homo sapiens
  source 1..30: mol_type = unassigned DNA
tgaagcagagttcccagggaggctgcaata

SEQ ID NO: 893 - DNA, 30 bp, Homo sapiens
  source 1..30: mol_type = unassigned DNA
tgttctgaagcagagttcccagggaggctg

SEQ ID NO: 894 - DNA, 30 bp, Homo sapiens
  source 1..30: mol_type = unassigned DNA
ataaaaataattatgttctgaagcagagtt

SEQ ID NO: 895 - DNA, 30 bp, Homo sapiens
  source 1..30: mol_type = unassigned DNA
atggaagttaaactttatggctgcatttca

SEQ ID NO: 896 - DNA, 30 bp, Homo sapiens
  source 1..30: mol_type = unassigned DNA
aactttatggctgcatttcataaggaaaaa

SEQ ID NO: 897 - DNA, 30 bp, Homo sapiens
  source 1..30: mol_type = unassigned DNA
atggctgcatttcataaggaaaaaaaactt

SEQ ID NO: 898 - DNA, 30 bp, Homo sapiens
  source 1..30: mol_type = unassigned DNA
tggctgcatttcataaggaaaaaaaacttc

SEQ ID NO: 899 - DNA, 30 bp, Homo sapiens
  source 1..30: mol_type = unassigned DNA
ttccagaagaataactgctaaatgggcact

SEQ ID NO: 900 - DNA, 30 bp, Homo sapiens
  source 1..30: mol_type = unassigned DNA
atgtgcgaactccaacatccaaaatacaat

SEQ ID NO: 901 - DNA, 30 bp, Homo sapiens
  source 1..30: mol_type = unassigned DNA
tactaatggttaatgtgcgaactccaacat

SEQ ID NO: 902 - DNA, 30 bp, Homo sapiens
  source 1..30: mol_type = unassigned DNA
ggtacttgtactaatggttaatgtgcgaac

SEQ ID NO: 903 - DNA, 30 bp, Homo sapiens
  source 1..30: mol_type = unassigned DNA
tattgggtacttgtactaatggttaatgtg

SEQ ID NO: 904 - DNA, 30 bp, Homo sapiens
  source 1..30: mol_type = unassigned DNA
ttatattgggtacttgtactaatggttaat

SEQ ID NO: 905 - DNA, 30 bp, Homo sapiens
  source 1..30: mol_type = unassigned DNA
tcctgatgatctattgttatattgggtact

SEQ ID NO: 906 - DNA, 30 bp, Homo sapiens
  source 1..30: mol_type = unassigned DNA
ttatcctgatgatctattgttatattgggt

SEQ ID NO: 907 - DNA, 30 bp, Homo sapiens
  source 1..30: mol_type = unassigned DNA
attatcctgatgatctattgttatattggg

SEQ ID NO: 908 - DNA, 30 bp, Homo sapiens
  source 1..30: mol_type = unassigned DNA
tcctgatataaagacatacaactaaaagat

SEQ ID NO: 909 - DNA, 30 bp, Homo sapiens
  source 1..30: mol_type = unassigned DNA
atcctgatataaagacatacaactaaaaga

SEQ ID NO: 910 - DNA, 30 bp, Homo sapiens
  source 1..30: mol_type = unassigned DNA
tctttatcctgatataaagacatacaacta

SEQ ID NO: 911 - DNA, 30 bp, Homo sapiens
  source 1..30: mol_type = unassigned DNA
actcaattctctttatcctgatataaagac

SEQ ID NO: 912 - DNA, 30 bp, Homo sapiens
  source 1..30: mol_type = unassigned DNA
gaaataaaaagtaactctgcattaataaaa

SEQ ID NO: 913 - DNA, 30 bp, Homo sapiens
  source 1..30: mol_type = unassigned DNA
cactcaattctctttatcctgatataaaga

SEQ ID NO: 914 - DNA, 30 bp, Homo sapiens
  source 1..30: mol_type = unassigned DNA
agataaatttcactcaattctctttatcct

SEQ ID NO: 915 - DNA, 30 bp, Homo sapiens
  source 1..30: mol_type = unassigned DNA
tgggactaggtttagataaatttcactcaa

SEQ ID NO: 916 - DNA, 30 bp, Homo sapiens
  source 1..30: mol_type = unassigned DNA
gtgggactaggtttagataaatttcactca

SEQ ID NO: 917 - DNA, 30 bp, Homo sapiens
  source 1..30: mol_type = unassigned DNA
taaaagtatttgtgggactaggtttagata

SEQ ID NO: 918 - DNA, 30 bp, Homo sapiens
  source 1..30: mol_type = unassigned DNA
acatgctctcttgtaaaagtatttgtggga

SEQ ID NO: 919 - DNA, 30 bp, Homo sapiens
  source 1..30: mol_type = unassigned DNA
aacatgctctcttgtaaaagtatttgtggg

SEQ ID NO: 920 - DNA, 30 bp, Homo sapiens
  source 1..30: mol_type = unassigned DNA
cactttaacatgctctcttgtaaaagtatt

SEQ ID NO: 921 - DNA, 30 bp, Homo sapiens
  source 1..30: mol_type = unassigned DNA
acactttaacatgctctcttgtaaaagtat

SEQ ID NO: 922 - DNA, 30 bp, Homo sapiens
  source 1..30: mol_type = unassigned DNA
atttacactttaacatgctctcttgtaaaa

SEQ ID NO: 923 - DNA, 30 bp, Homo sapiens
  source 1..30: mol_type = unassigned DNA
aatttacactttaacatgctctcttgtaaa

SEQ ID NO: 924 - DNA, 30 bp, Homo sapiens
  source 1..30: mol_type = unassigned DNA
caaagacagagtagaatgctaataaaaatt

SEQ ID NO: 925 - DNA, 30 bp, Homo sapiens
  source 1..30: mol_type = unassigned DNA
ataaggaaaaaaaacttccaaagacagagt

SEQ ID NO: 926 - DNA, 30 bp, Homo sapiens
  source 1..30: mol_type = unassigned DNA
cataaggaaaaaaaacttccaaagacagag

SEQ ID NO: 927 - DNA, 30 bp, Homo sapiens
  source 1..30: mol_type = unassigned DNA
gataaatttcactcaattctctttatcctg

SEQ ID NO: 928 - DNA, 30 bp, Homo sapiens
  source 1..30: mol_type = unassigned DNA
caggcgttgctttacaatctttgtaaaaaa

SEQ ID NO: 929 - DNA, 30 bp, Homo sapiens
  source 1..30: mol_type = unassigned DNA
ttggaaataaaaagtaactctgcattaata

SEQ ID NO: 930 - DNA, 30 bp, Homo sapiens
  source 1..30: mol_type = unassigned DNA
tgttggaaataaaaagtaactctgcattaa

SEQ ID NO: 931 - DNA, 30 bp, Homo sapiens
  source 1..30: mol_type = unassigned DNA
gaacattttttagtcttctatgcttgcctg

SEQ ID NO: 932 - DNA, 30 bp, Homo sapiens
  source 1..30: mol_type = unassigned DNA
tgaacattttttagtcttctatgcttgcct

SEQ ID NO: 933 - DNA, 30 bp, Homo sapiens
  source 1..30: mol_type = unassigned DNA
ttttgaacattttttagtcttctatgcttg

SEQ ID NO: 934 - DNA, 30 bp, Homo sapiens
  source 1..30: mol_type = unassigned DNA
cttttgaacattttttagtcttctatgctt

SEQ ID NO: 935 - DNA, 30 bp, Homo sapiens
  source 1..30: mol_type = unassigned DNA
tcttttgaacattttttagtcttctatgct

SEQ ID NO: 936 - DNA, 30 bp, Homo sapiens
  source 1..30: mol_type = unassigned DNA
ttcttttgaacattttttagtcttctatgc

SEQ ID NO: 937 - DNA, 30 bp, Homo sapiens
  source 1..30: mol_type = unassigned DNA
atttttcttttgaacattttttagtcttct

SEQ ID NO: 938 - DNA, 30 bp, Homo sapiens
  source 1..30: mol_type = unassigned DNA
aatttttcttttgaacattttttagtcttc

SEQ ID NO: 939 - DNA, 30 bp, Homo sapiens
  source 1..30: mol_type = unassigned DNA
taaaaatgacaaggtcccatatagatagat

SEQ ID NO: 940 - DNA, 30 bp, Homo sapiens
  source 1..30: mol_type = unassigned DNA
ctaaaaatgacaaggtcccatatagataga

SEQ ID NO: 941 - DNA, 30 bp, Homo sapiens
  source 1..30: mol_type = unassigned DNA
tctaaaaatgacaaggtcccatatagatag

SEQ ID NO: 942 - DNA, 30 bp, Homo sapiens
  source 1..30: mol_type = unassigned DNA
aaaaggatgaagcaggtgaatgttttctaa

SEQ ID NO: 943 - DNA, 30 bp, Homo sapiens
  source 1..30: mol_type = unassigned DNA
tatgaagattcaaaaggatgaagcaggtga

SEQ ID NO: 944 - DNA, 30 bp, Homo sapiens
  source 1..30: mol_type = unassigned DNA
tatagtatgcccatctcagagggattatat

SEQ ID NO: 945 - DNA, 30 bp, Homo sapiens
  source 1..30: mol_type = unassigned DNA
aataagacaacttgtatagtatgcccatct

SEQ ID NO: 946 - DNA, 30 bp, Homo sapiens
  source 1..30: mol_type = unassigned DNA
aaataagacaacttgtatagtatgcccatc

SEQ ID NO: 947 - DNA, 30 bp, Homo sapiens
  source 1..30: mol_type = unassigned DNA
ccaatctttaaataagacaacttgtatagt

SEQ ID NO: 948 - DNA, 30 bp, Homo sapiens
  source 1..30: mol_type = unassigned DNA
accaatctttaaataagacaacttgtatag

SEQ ID NO: 949 - DNA, 30 bp, Homo sapiens
  source 1..30: mol_type = unassigned DNA
aatttaccaatctttaaataagacaacttg

SEQ ID NO: 950 - DNA, 30 bp, Homo sapiens
  source 1..30: mol_type = unassigned DNA
agcttaaatttaccaatctttaaataagac

SEQ ID NO: 951 - DNA, 30 bp, Homo sapiens
  source 1..30: mol_type = unassigned DNA
gagcttaaatttaccaatctttaaataaga

SEQ ID NO: 952 - DNA, 30 bp, Homo sapiens
  source 1..30: mol_type = unassigned DNA
tttgagcttaaatttaccaatctttaaata

SEQ ID NO: 953 - DNA, 30 bp, Homo sapiens
  source 1..30: mol_type = unassigned DNA
ccactgaataaattatttgagcttaaattt

SEQ ID NO: 954 - DNA, 30 bp, Homo sapiens
  source 1..30: mol_type = unassigned DNA
cgagtctgcctctgaggcttgccactgaat

SEQ ID NO: 955 - DNA, 30 bp, Homo sapiens
  source 1..30: mol_type = unassigned DNA
gacctgtgttccgagtctgcctctgaggct

SEQ ID NO: 956 - DNA, 30 bp, Homo sapiens
  source 1..30: mol_type = unassigned DNA
taatatatatataatatatattagacctgt

SEQ ID NO: 957 - DNA, 30 bp, Homo sapiens
  source 1..30: mol_type = unassigned DNA
tatgttataatatatatataatatatatta

SEQ ID NO: 958 - DNA, 30 bp, Homo sapiens
  source 1..30: mol_type = unassigned DNA
aacattttttagtcttctatgcttgcctgc

SEQ ID NO: 959 - DNA, 30 bp, Homo sapiens
  source 1..30: mol_type = unassigned DNA
tttagtcttctatgcttgcctgctcctttt

SEQ ID NO: 960 - DNA, 30 bp, Homo sapiens
  source 1..30: mol_type = unassigned DNA
ttagtcttctatgcttgcctgctcctttta

SEQ ID NO: 961 - DNA, 30 bp, Homo sapiens
  source 1..30: mol_type = unassigned DNA
tagtcttctatgcttgcctgctccttttaa

SEQ ID NO: 962 - DNA, 30 bp, Homo sapiens
  source 1..30: mol_type = unassigned DNA
ttgttggaaataaaaagtaactctgcatta

SEQ ID NO: 963 - DNA, 30 bp, Homo sapiens
  source 1..30: mol_type = unassigned DNA
aataataacaatagatatttttgttggaaa

SEQ ID NO: 964 - DNA, 30 bp, Homo sapiens
  source 1..30: mol_type = unassigned DNA
tcagataaagctgtaagacttaaataataa

SEQ ID NO: 965 - DNA, 30 bp, Homo sapiens
  source 1..30: mol_type = unassigned DNA
ctcagataaagctgtaagacttaaataata

SEQ ID NO: 966 - DNA, 30 bp, Homo sapiens
  source 1..30: mol_type = unassigned DNA
gaatttctcagataaagctgtaagacttaa

SEQ ID NO: 967 - DNA, 30 bp, Homo sapiens
  source 1..30: mol_type = unassigned DNA
tgagaagggtgctaattggaatttctcaga

SEQ ID NO: 968 - DNA, 30 bp, Homo sapiens
  source 1..30: mol_type = unassigned DNA
ttatgagaagggtgctaattggaatttctc

SEQ ID NO: 969 - DNA, 30 bp, Homo sapiens
  source 1..30: mol_type = unassigned DNA
attatgagaagggtgctaattggaatttct

SEQ ID NO: 970 - DNA, 30 bp, Homo sapiens
  source 1..30: mol_type = unassigned DNA
aatatttattatgagaagggtgctaattgg

SEQ ID NO: 971 - DNA, 30 bp, Homo sapiens
  source 1..30: mol_type = unassigned DNA
gaatatttattatgagaagggtgctaattg

SEQ ID NO: 972 - DNA, 30 bp, Homo sapiens
  source 1..30: mol_type = unassigned DNA
atgtgtttgaatatttattatgagaagggt

SEQ ID NO: 973 - DNA, 30 bp, Homo sapiens
  source 1..30: mol_type = unassigned DNA
catgtgtttgaatatttattatgagaaggg

SEQ ID NO: 974 - DNA, 30 bp, Homo sapiens
  source 1..30: mol_type = unassigned DNA
tcatgtgtttgaatatttattatgagaagg

SEQ ID NO: 975 - DNA, 30 bp, Homo sapiens
  source 1..30: mol_type = unassigned DNA
gttggaaataaaaagtaactctgcattaat

SEQ ID NO: 976 - DNA, 30 bp, Homo sapiens
  source 1..30: mol_type = unassigned DNA
ttcatgtgtttgaatatttattatgagaag

SEQ ID NO: 977 - DNA, 30 bp, Homo sapiens
  source 1..30: mol_type = unassigned DNA
ggtaatttttcatgtgtttgaatatttatt

SEQ ID NO: 978 - DNA, 30 bp, Homo sapiens
  source 1..30: mol_type = unassigned DNA
aaagactagaacaactttggtaatttttca

SEQ ID NO: 979 - DNA, 30 bp, Homo sapiens
  source 1..30: mol_type = unassigned DNA
aagtgacaagagtgcaggatcatgtaatat

SEQ ID NO: 980 - DNA, 30 bp, Homo sapiens
  source 1..30: mol_type = unassigned DNA
aaagtgacaagagtgcaggatcatgtaata

SEQ ID NO: 981 - DNA, 30 bp, Homo sapiens
  source 1..30: mol_type = unassigned DNA
taaagtgacaagagtgcaggatcatgtaat

SEQ ID NO: 982 - DNA, 30 bp, Homo sapiens
  source 1..30: mol_type = unassigned DNA
ttaaagtgacaagagtgcaggatcatgtaa

SEQ ID NO: 983 - DNA, 30 bp, Homo sapiens
  source 1..30: mol_type = unassigned DNA
aaaaactatataagaaaaaaatcatcagaa

SEQ ID NO: 984 - DNA, 30 bp, Homo sapiens
  source 1..30: mol_type = unassigned DNA
aaaaaactatataagaaaaaaatcatcaga

SEQ ID NO: 985 - DNA, 30 bp, Homo sapiens
  source 1..30: mol_type = unassigned DNA
taaaaaactatataagaaaaaaatcatcag

SEQ ID NO: 986 - DNA, 30 bp, Homo sapiens
  source 1..30: mol_type = unassigned DNA
cctgctccttttaaaaaactatataagaaa

SEQ ID NO: 987 - DNA, 30 bp, Homo sapiens
  source 1..30: mol_type = unassigned DNA
tatgcttgcctgctccttttaaaaaactat

SEQ ID NO: 988 - DNA, 30 bp, Homo sapiens
  source 1..30: mol_type = unassigned DNA
gtcttctatgcttgcctgctccttttaaaa

SEQ ID NO: 989 - DNA, 30 bp, Homo sapiens
  source 1..30: mol_type = unassigned DNA
agtcttctatgcttgcctgctccttttaaa

SEQ ID NO: 990 - DNA, 30 bp, Homo sapiens
  source 1..30: mol_type = unassigned DNA
gtaatttttcatgtgtttgaatatttatta

SEQ ID NO: 991 - DNA, 30 bp, Homo sapiens
  source 1..30: mol_type = unassigned DNA
gtggatttagtcttttgcagaaaaaaagat

SEQ ID NO: 992 - DNA, 30 bp, Homo sapiens
  source 1..30: mol_type = unassigned DNA
ggaagtaaaatattttgtaaagattaccat

SEQ ID NO: 993 - DNA, 30 bp, Homo sapiens
  source 1..30: mol_type = unassigned DNA
gtaaagattaccatagatttaaaaatgtta

SEQ ID NO: 994 - DNA, 30 bp, Homo sapiens
  source 1..30: mol_type = unassigned DNA
cctttttgtgggggaaagggatgagggcaa

SEQ ID NO: 995 - DNA, 30 bp, Homo sapiens
  source 1..30: mol_type = unassigned DNA
acctttttgtgggggaaagggatgagggca

SEQ ID NO: 996 - DNA, 30 bp, Homo sapiens
  source 1..30: mol_type = unassigned DNA
aaatgaacaactggagacaaatttaccttt

SEQ ID NO: 997 - DNA, 30 bp, Homo sapiens
  source 1..30: mol_type = unassigned DNA
taacttaaaatgaacaactggagacaaatt

SEQ ID NO: 998 - DNA, 30 bp, Homo sapiens
  source 1..30: mol_type = unassigned DNA
ataacttaaaatgaacaactggagacaaat

SEQ ID NO: 999 - DNA, 30 bp, Homo sapiens
  source 1..30: mol_type = unassigned DNA
ctttataacttaaaatgaacaactggagac

SEQ ID NO: 1000 - DNA, 30 bp, Homo sapiens
  source 1..30: mol_type = unassigned DNA
gctttataacttaaaatgaacaactggaga

SEQ ID NO: 1001 - DNA, 30 bp, Homo sapiens
  source 1..30: mol_type = unassigned DNA
gccacatgaacatacataatcctggcagga

SEQ ID NO: 1002 - DNA, 30 bp, Homo sapiens
  source 1..30: mol_type = unassigned DNA
cacatgtatcttagccacatgaacatacat

SEQ ID NO: 1003 - DNA, 30 bp, Homo sapiens
  source 1..30: mol_type = unassigned DNA
gcaagcacttgcacatgtatcttagccaca

SEQ ID NO: 1004 - DNA, 30 bp, Homo sapiens
  source 1..30: mol_type = unassigned DNA
gcacacaaaccctgctcttagcaagcactt

SEQ ID NO: 1005 - DNA, 30 bp, Homo sapiens
  source 1..30: mol_type = unassigned DNA
cagcaatcgttggcacacaaaccctgctct

SEQ ID NO: 1006 - DNA, 30 bp, Homo sapiens
  source 1..30: mol_type = unassigned DNA
ccagcaatcgttggcacacaaaccctgctc

SEQ ID NO: 1007 - DNA, 30 bp, Homo sapiens
  source 1..30: mol_type = unassigned DNA
tccagcaatcgttggcacacaaaccctgct

SEQ ID NO: 1008 - DNA, 30 bp, Homo sapiens
  source 1..30: mol_type = unassigned DNA
cagagaattttccagcaatcgttggcacac

SEQ ID NO: 1009 - DNA, 30 bp, Homo sapiens
  source 1..30: mol_type = unassigned DNA
gcagagaattttccagcaatcgttggcaca

SEQ ID NO: 1010 - DNA, 30 bp, Homo sapiens
  source 1..30: mol_type = unassigned DNA
tttgcagagaattttccagcaatcgttggc

SEQ ID NO: 1011 - DNA, 30 bp, Homo sapiens
  source 1..30: mol_type = unassigned DNA
cagccacaaacaattctttgcagagaattt

SEQ ID NO: 1012 - DNA, 30 bp, Homo sapiens
  source 1..30: mol_type = unassigned DNA
tcacccattgcagccacaaacaattctttg

SEQ ID NO: 1013 - DNA, 30 bp, Homo sapiens
  source 1..30: mol_type = unassigned DNA
tatatgtgtattctcacccattgcagccac

SEQ ID NO: 1014 - DNA, 30 bp, Homo sapiens
  source 1..30: mol_type = unassigned DNA
aagatcatctcaattatatatgtgtattct

SEQ ID NO: 1015 - DNA, 30 bp, Homo sapiens
  source 1..30: mol_type = unassigned DNA
tgttgaagatcatctcaattatatatgtgt

SEQ ID NO: 1016 - DNA, 30 bp, Homo sapiens
  source 1..30: mol_type = unassigned DNA
tagatataaccttatgttgaagatcatctc

SEQ ID NO: 1017 - DNA, 30 bp, Homo sapiens
  source 1..30: mol_type = unassigned DNA
atagatataaccttatgttgaagatcatct

SEQ ID NO: 1018 - DNA, 30 bp, Homo sapiens
  source 1..30: mol_type = unassigned DNA
tatatttatagatataaccttatgttgaag

SEQ ID NO: 1019 - DNA, 30 bp, Homo sapiens
  source 1..30: mol_type = unassigned DNA
atatatttatagatataaccttatgttgaa

SEQ ID NO: 1020 - DNA, 30 bp, Homo sapiens
  source 1..30: mol_type = unassigned DNA
tgcataaactatatttatatatttatagat

SEQ ID NO: 1021 - DNA, 30 bp, Homo sapiens
  source 1..30: mol_type = unassigned DNA
ttgtgggggaaagggatgagggcaattagg

SEQ ID NO: 1022 - DNA, 30 bp, Homo sapiens
  source 1..30: mol_type = unassigned DNA
gtgcataaactatatttatatatttataga

SEQ ID NO: 1023 - DNA, 30 bp, Homo sapiens
  source 1..30: mol_type = unassigned DNA
tgtgggggaaagggatgagggcaattagga

SEQ ID NO: 1024 - DNA, 30 bp, Homo sapiens
  source 1..30: mol_type = unassigned DNA
tgggggaaagggatgagggcaattaggagg

SEQ ID NO: 1025 - DNA, 30 bp, Homo sapiens
  source 1..30: mol_type = unassigned DNA
tggactgcggggctgaaaaaagaggttcca

SEQ ID NO: 1026 - DNA, 30 bp, Homo sapiens
  source 1..30: mol_type = unassigned DNA
gctgggaggggctcggtgctggggctgaga

SEQ ID NO: 1027 - DNA, 30 bp, Homo sapiens
  source 1..30: mol_type = unassigned DNA
tgcagagccacccgcttggctgggaggggc

SEQ ID NO: 1028 - DNA, 30 bp, Homo sapiens
  source 1..30: mol_type = unassigned DNA
ctgcagagccacccgcttggctgggagggg

SEQ ID NO: 1029 - DNA, 30 bp, Homo sapiens
  source 1..30: mol_type = unassigned DNA
tctgcagagccacccgcttggctgggaggg

SEQ ID NO: 1030 - DNA, 30 bp, Homo sapiens
  source 1..30: mol_type = unassigned DNA
tgtggccgggcggggctcgagccagctttt

SEQ ID NO: 1031 - DNA, 30 bp, Homo sapiens
  source 1..30: mol_type = unassigned DNA
gtgtggccgggcggggctcgagccagcttt

SEQ ID NO: 1032 - DNA, 30 bp, Homo sapiens
  source 1..30: mol_type = unassigned DNA
ggctgggggaaaaaaagccccgagctccgc

SEQ ID NO: 1033 - DNA, 30 bp, Homo sapiens
  source 1..30: mol_type = unassigned DNA
tggaaaatcatagagaacagagggtgggcg

SEQ ID NO: 1034 - DNA, 30 bp, Homo sapiens
  source 1..30: mol_type = unassigned DNA
gagaagcccctcgcggggtctccattctgg

SEQ ID NO: 1035 - DNA, 30 bp, Homo sapiens
  source 1..30: mol_type = unassigned DNA
tggaaagcgggggtagctcaggacactgcg

SEQ ID NO: 1036 - DNA, 30 bp, Homo sapiens
  source 1..30: mol_type = unassigned DNA
tggacgtgcgagtgaactgcgaattgtgga

SEQ ID NO: 1037 - DNA, 30 bp, Homo sapiens
  source 1..30: mol_type = unassigned DNA
ctggacgtgcgagtgaactgcgaattgtgg

SEQ ID NO: 1038 - DNA, 30 bp, Homo sapiens
  source 1..30: mol_type = unassigned DNA
tcagaacctttctggacgtgcgagtgaact

SEQ ID NO: 1039 - DNA, 30 bp, Homo sapiens
  source 1..30: mol_type = unassigned DNA
tgaggggtgcagaaagcgaggcgagatcgc

SEQ ID NO: 1040 - DNA, 30 bp, Homo sapiens
  source 1..30: mol_type = unassigned DNA
ctgaggggtgcagaaagcgaggcgagatcg

SEQ ID NO: 1041 - DNA, 30 bp, Homo sapiens
  source 1..30: mol_type = unassigned DNA
cagccactagcctgcagcggaaacctttct

SEQ ID NO: 1042 - DNA, 30 bp, Homo sapiens
  source 1..30: mol_type = unassigned DNA
gcagccactagcctgcagcggaaacctttc

SEQ ID NO: 1043 - DNA, 30 bp, Homo sapiens
  source 1..30: mol_type = unassigned DNA
aaatgataataatactgatgatgacgatga

SEQ ID NO: 1044 - DNA, 30 bp, Homo sapiens
  source 1..30: mol_type = unassigned DNA
gaaatgataataatactgatgatgacgatg

SEQ ID NO: 1045 - DNA, 30 bp, Homo sapiens
  source 1..30: mol_type = unassigned DNA
aataataacaacgatttgaaatgataataa

SEQ ID NO: 1046 - DNA, 30 bp, Homo sapiens
  source 1..30: mol_type = unassigned DNA
aacaaatgagaacaaacaaggctactgaat

SEQ ID NO: 1047 - DNA, 30 bp, Homo sapiens
  source 1..30: mol_type = unassigned DNA
gaacaaatgagaacaaacaaggctactgaa

SEQ ID NO: 1048 - DNA, 30 bp, Homo sapiens
  source 1..30: mol_type = unassigned DNA
tgaacaaatgagaacaaacaaggctactga

SEQ ID NO: 1049 - DNA, 30 bp, Homo sapiens
  source 1..30: mol_type = unassigned DNA
accaagagcaatccacgtcccttttgaaca

SEQ ID NO: 1050 - DNA, 30 bp, Homo sapiens
  source 1..30: mol_type = unassigned DNA
atccttaaccaagagcaatccacgtccctt

SEQ ID NO: 1051 - DNA, 30 bp, Homo sapiens
  source 1..30: mol_type = unassigned DNA
ggaggaagcaaagcgaacgcaacaagggtt

SEQ ID NO: 1052 - DNA, 30 bp, Homo sapiens
  source 1..30: mol_type = unassigned DNA
gtgggggaaagggatgagggcaattaggag

SEQ ID NO: 1053 - DNA, 30 bp, Homo sapiens
  source 1..30: mol_type = unassigned DNA
tgtgcataaactatatttatatatttatag

SEQ ID NO: 1054 - DNA, 30 bp, Homo sapiens
  source 1..30: mol_type = unassigned DNA
aaattttgtgcataaactatatttatatat

SEQ ID NO: 1055 - DNA, 30 bp, Homo sapiens
  source 1..30: mol_type = unassigned DNA
aggggaaaaaacttaaaattttgtgcataa

SEQ ID NO: 1056 - DNA, 30 bp, Homo sapiens
  source 1..30: mol_type = unassigned DNA
atttcaaaatctattattttaatactgcag

SEQ ID NO: 1057 - DNA, 30 bp, Homo sapiens
  source 1..30: mol_type = unassigned DNA
gaattaatttcaaaatctattattttaata

SEQ ID NO: 1058 - DNA, 30 bp, Homo sapiens
  source 1..30: mol_type = unassigned DNA
aaattggaattaatttcaaaatctattatt

SEQ ID NO: 1059 - DNA, 30 bp, Homo sapiens
  source 1..30: mol_type = unassigned DNA
gaaattggaattaatttcaaaatctattat

SEQ ID NO: 1060 - DNA, 30 bp, Homo sapiens
  source 1..30: mol_type = unassigned DNA
tctttgaaattggaattaatttcaaaatct

SEQ ID NO: 1061 - DNA, 30 bp, Homo sapiens
  source 1..30: mol_type = unassigned DNA
attatctttgaaattggaattaatttcaaa

SEQ ID NO: 1062 - DNA, 30 bp, Homo sapiens
  source 1..30: mol_type = unassigned DNA
atgaatcaggaaaaaagcactcgccctgat

SEQ ID NO: 1063 - DNA, 30 bp, Homo sapiens
  source 1..30: mol_type = unassigned DNA
aatgaatcaggaaaaaagcactcgccctga

SEQ ID NO: 1064 - DNA, 30 bp, Homo sapiens
  source 1..30: mol_type = unassigned DNA
tttaatgaatcaggaaaaaagcactcgccc

SEQ ID NO: 1065 - DNA, 30 bp, Homo sapiens
  source 1..30: mol_type = unassigned DNA
caatcatgctgaatacataattgtttaatg

SEQ ID NO: 1066 - DNA, 30 bp, Homo sapiens
  source 1..30: mol_type = unassigned DNA
tatgcacctcttacaatcatgctgaataca

SEQ ID NO: 1067 - DNA, 30 bp, Homo sapiens
  source 1..30: mol_type = unassigned DNA
gaaaagataatggggaatattatatgcacc

SEQ ID NO: 1068 - DNA, 30 bp, Homo sapiens
  source 1..30: mol_type = unassigned DNA
attagaaaagataatggggaatattatatg

SEQ ID NO: 1069 - DNA, 30 bp, Homo sapiens
  source 1..30: mol_type = unassigned DNA
agaaggtgcccacttcattagaaaagataa

SEQ ID NO: 1070 - DNA, 30 bp, Homo sapiens
  source 1..30: mol_type = unassigned DNA
tatatccattcagaaggtgcccacttcatt

SEQ ID NO: 1071 - DNA, 30 bp, Homo sapiens
  source 1..30: mol_type = unassigned DNA
cttatatatccattcagaaggtgcccactt

SEQ ID NO: 1072 - DNA, 30 bp, Homo sapiens
  source 1..30: mol_type = unassigned DNA
tagttacttatatatccattcagaaggtgc

SEQ ID NO: 1073 - DNA, 30 bp, Homo sapiens
  source 1..30: mol_type = unassigned DNA
ctagttacttatatatccattcagaaggtg

SEQ ID NO: 1074 - DNA, 30 bp, Homo sapiens
  source 1..30: mol_type = unassigned DNA
atttctagttacttatatatccattcagaa

SEQ ID NO: 1075 - DNA, 30 bp, Homo sapiens
  source 1..30: mol_type = unassigned DNA
catttctagttacttatatatccattcaga

SEQ ID NO: 1076 - DNA, 30 bp, Homo sapiens
  source 1..30: mol_type = unassigned DNA
tcatttctagttacttatatatccattcag

SEQ ID NO: 1077 - DNA, 30 bp, Homo sapiens
  source 1..30: mol_type = unassigned DNA
tgaccaaatcctcagcttttcatttctagt

SEQ ID NO: 1078 - DNA, 30 bp, Homo sapiens
  source 1..30: mol_type = unassigned DNA
tcctgaaattctgaccaaatcctcagcttt

SEQ ID NO: 1079 - DNA, 30 bp, Homo sapiens
  source 1..30: mol_type = unassigned DNA
atcctgaaattctgaccaaatcctcagctt

SEQ ID NO: 1080 - DNA, 30 bp, Homo sapiens
  source 1..30: mol_type = unassigned DNA
tatcctgaaattctgaccaaatcctcagct

SEQ ID NO: 1081 - DNA, 30 bp, Homo sapiens
  source 1..30: mol_type = unassigned DNA
agttttatcctgaaattctgaccaaatcct

SEQ ID NO: 1082 - DNA, 30 bp, Homo sapiens
  source 1..30: mol_type = unassigned DNA
cagttttatcctgaaattctgaccaaatcc

SEQ ID NO: 1083 - DNA, 30 bp, Homo sapiens
  source 1..30: mol_type = unassigned DNA
caaaatctattattttaatactgcagaagt

SEQ ID NO: 1084 - DNA, 30 bp, Homo sapiens
  source 1..30: mol_type = unassigned DNA
aaaatctattattttaatactgcagaagta

SEQ ID NO: 1085 - DNA, 30 bp, Homo sapiens
  source 1..30: mol_type = unassigned DNA
ttttaatactgcagaagtagtgtttttttc

SEQ ID NO: 1086 - DNA, 30 bp, Homo sapiens
  source 1..30: mol_type = unassigned DNA
taatactgcagaagtagtgtttttttcatg

SEQ ID NO: 1087 - DNA, 30 bp, Homo sapiens
  source 1..30: mol_type = unassigned DNA
caggggaaaaaacttaaaattttgtgcata

SEQ ID NO: 1088 - DNA, 30 bp, Homo sapiens
  source 1..30: mol_type = unassigned DNA
gaagaacagtttcaggggaaaaaacttaaa

SEQ ID NO: 1089 - DNA, 30 bp, Homo sapiens
  source 1..30: mol_type = unassigned DNA
aggctgtatcaagaatcagcagttggaaga

SEQ ID NO: 1090 - DNA, 30 bp, Homo sapiens
  source 1..30: mol_type = unassigned DNA
acgatccatgtatctgtgtaggattgaggc

SEQ ID NO: 1091 - DNA, 30 bp, Homo sapiens
  source 1..30: mol_type = unassigned DNA
cacgatccatgtatctgtgtaggattgagg

SEQ ID NO: 1092 - DNA, 30 bp, Homo sapiens
  source 1..30: mol_type = unassigned DNA
gatggcggctaccatttcacgatccatgta

SEQ ID NO: 1093 - DNA, 30 bp, Homo sapiens
  source 1..30: mol_type = unassigned DNA
ggatggcggctaccatttcacgatccatgt

SEQ ID NO: 1094 - DNA, 30 bp, Homo sapiens
  source 1..30: mol_type = unassigned DNA
tttggatggcggctaccatttcacgatcca

SEQ ID NO: 1095 - DNA, 30 bp, Homo sapiens
  source 1..30: mol_type = unassigned DNA
atttggatggcggctaccatttcacgatcc

SEQ ID NO: 1096 - DNA, 30 bp, Homo sapiens
  source 1..30: mol_type = unassigned DNA
tatttggatggcggctaccatttcacgatc

SEQ ID NO: 1097 - DNA, 30 bp, Homo sapiens
  source 1..30: mol_type = unassigned DNA
ttatttggatggcggctaccatttcacgat

SEQ ID NO: 1098 - DNA, 30 bp, Homo sapiens
  source 1..30: mol_type = unassigned DNA
gggtgggatttttatttggatggcggctac

SEQ ID NO: 1099 - DNA, 30 bp, Homo sapiens
  source 1..30: mol_type = unassigned DNA
ggggtgggatttttatttggatggcggcta

SEQ ID NO: 1100 - DNA, 30 bp, Homo sapiens
  source 1..30: mol_type = unassigned DNA
caggactgcatacagctcaactgcccctcc

SEQ ID NO: 1101 - DNA, 30 bp, Homo sapiens
  source 1..30: mol_type = unassigned DNA
tcatatttggggtgggatttttatttggat

SEQ ID NO: 1102 - DNA, 30 bp, Homo sapiens
  source 1..30: mol_type = unassigned DNA
cgtttgtcatatttggggtgggatttttat

SEQ ID NO: 1103 - DNA, 30 bp, Homo sapiens
  source 1..30: mol_type = unassigned DNA
tggccagaaaggatgcttgcgtttgtcata

SEQ ID NO: 1104 - DNA, 30 bp, Homo sapiens
  source 1..30: mol_type = unassigned DNA
aattatggccagaaaggatgcttgcgtttg

SEQ ID NO: 1105 - DNA, 30 bp, Homo sapiens
  source 1..30: mol_type = unassigned DNA
caaatgcagttaaattatggccagaaagga

SEQ ID NO: 1106 - DNA, 30 bp, Homo sapiens
  source 1..30: mol_type = unassigned DNA
gcaaatgcagttaaattatggccagaaagg

SEQ ID NO: 1107 - DNA, 30 bp, Homo sapiens
  source 1..30: mol_type = unassigned DNA
atgatttgcaaatgcagttaaattatggcc

SEQ ID NO: 1108 - DNA, 30 bp, Homo sapiens
  source 1..30: mol_type = unassigned DNA
catgatttgcaaatgcagttaaattatggc

SEQ ID NO: 1109 - DNA, 30 bp, Homo sapiens
  source 1..30: mol_type = unassigned DNA
tcatgatttgcaaatgcagttaaattatgg

SEQ ID NO: 1110 - DNA, 30 bp, Homo sapiens
  source 1..30: mol_type = unassigned DNA
ttcatgatttgcaaatgcagttaaattatg

SEQ ID NO: 1111 - DNA, 30 bp, Homo sapiens
  source 1..30: mol_type = unassigned DNA
tttcatgatttgcaaatgcagttaaattat

SEQ ID NO: 1112 - DNA, 30 bp, Homo sapiens
  source 1..30: mol_type = unassigned DNA
ttttcatgatttgcaaatgcagttaaatta

SEQ ID NO: 1113 - DNA, 30 bp, Homo sapiens
  source 1..30: mol_type = unassigned DNA
atactgcagaagtagtgtttttttcatgat

SEQ ID NO: 1114 - DNA, 30 bp, Homo sapiens
  source 1..30: mol_type = unassigned DNA
aatactgcagaagtagtgtttttttcatga

SEQ ID NO: 1115 - DNA, 30 bp, Homo sapiens
  source 1..30: mol_type = unassigned DNA
gtcatatttggggtgggatttttatttgga

SEQ ID NO: 1116 - DNA, 30 bp, Homo sapiens
  source 1..30: mol_type = unassigned DNA
ctcttccccgccagtctcggagcctgaggt

SEQ ID NO: 1117 - DNA, 30 bp, Homo sapiens
  source 1..30: mol_type = unassigned DNA
cccgccagtctcggagcctgaggtctcccc

SEQ ID NO: 1118 - DNA, 30 bp, Homo sapiens
  source 1..30: mol_type = unassigned DNA
cggcagctttccctgtctccgcatcctgca

SEQ ID NO: 1119 - DNA, 30 bp, Homo sapiens
  source 1..30: mol_type = unassigned DNA
caaaatgtcccttaagcccatttaaggcaa

SEQ ID NO: 1120 - DNA, 30 bp, Homo sapiens
  source 1..30: mol_type = unassigned DNA
ccaaaatgtcccttaagcccatttaaggca

SEQ ID NO: 1121 - DNA, 30 bp, Homo sapiens
  source 1..30: mol_type = unassigned DNA
taaagcactttccaaaatgtcccttaagcc

SEQ ID NO: 1122 - DNA, 30 bp, Homo sapiens
  source 1..30: mol_type = unassigned DNA
aactagagaagaaataaaaaaaaaaaaggt

SEQ ID NO: 1123 - DNA, 30 bp, Homo sapiens
  source 1..30: mol_type = unassigned DNA
ttaaactagagaagaaataaaaaaaaaaaa

SEQ ID NO: 1124 - DNA, 30 bp, Homo sapiens
  source 1..30: mol_type = unassigned DNA
ttcttaaactagagaagaaataaaaaaaaa

SEQ ID NO: 1125 - DNA, 30 bp, Homo sapiens
  source 1..30: mol_type = unassigned DNA
cttcttaaactagagaagaaataaaaaaaa

SEQ ID NO: 1126 - DNA, 30 bp, Homo sapiens
  source 1..30: mol_type = unassigned DNA
tcttcttaaactagagaagaaataaaaaaa

SEQ ID NO: 1127 - DNA, 30 bp, Homo sapiens
  source 1..30: mol_type = unassigned DNA
ctattttcttcttaaactagagaagaaata

SEQ ID NO: 1128 - DNA, 30 bp, Homo sapiens
  source 1..30: mol_type = unassigned DNA
cctattttcttcttaaactagagaagaaat

SEQ ID NO: 1129 - DNA, 30 bp, Homo sapiens
  source 1..30: mol_type = unassigned DNA
cccctttcctattttcttcttaaactagag

SEQ ID NO: 1130 - DNA, 30 bp, Homo sapiens
  source 1..30: mol_type = unassigned DNA
acccctttcctattttcttcttaaactaga

SEQ ID NO: 1131 - DNA, 30 bp, Homo sapiens
  source 1..30: mol_type = unassigned DNA
cctttacccctttcctattttcttcttaaa

SEQ ID NO: 1132 - DNA, 30 bp, Homo sapiens
  source 1..30: mol_type = unassigned DNA
tcccaccttccctttacccctttcctattt

SEQ ID NO: 1133 - DNA, 30 bp, Homo sapiens
  source 1..30: mol_type = unassigned DNA
ctcccaccttccctttacccctttcctatt

SEQ ID NO: 1134 - DNA, 30 bp, Homo sapiens
  source 1..30: mol_type = unassigned DNA
ctttctcccaccttccctttacccctttcc

SEQ ID NO: 1135 - DNA, 30 bp, Homo sapiens
  source 1..30: mol_type = unassigned DNA
cctttctcccaccttccctttacccctttc

SEQ ID NO: 1136 - DNA, 30 bp, Homo sapiens
  source 1..30: mol_type = unassigned DNA
tcctttctcccaccttccctttaccccttt

SEQ ID NO: 1137 - DNA, 30 bp, Homo sapiens
  source 1..30: mol_type = unassigned DNA
ttcctttctcccaccttccctttacccctt

SEQ ID NO: 1138 - DNA, 30 bp, Homo sapiens
  source 1..30: mol_type = unassigned DNA
tttttcctttctcccaccttccctttaccc

SEQ ID NO: 1139 - DNA, 30 bp, Homo sapiens
  source 1..30: mol_type = unassigned DNA
ctttttcctttctcccaccttccctttacc

SEQ ID NO: 1140 - DNA, 30 bp, Homo sapiens
  source 1..30: mol_type = unassigned DNA
tctttttcctttctcccaccttccctttac

SEQ ID NO: 1141 - DNA, 30 bp, Homo sapiens
  source 1..30: mol_type = unassigned DNA
caattttctttttcctttctcccaccttcc

SEQ ID NO: 1142 - DNA, 30 bp, Homo sapiens
  source 1..30: mol_type = unassigned DNA
gcaattttctttttcctttctcccaccttc

SEQ ID NO: 1143 - DNA, 30 bp, Homo sapiens
  source 1..30: mol_type = unassigned DNA
actttgcaattttctttttcctttctccca

SEQ ID NO: 1144 - DNA, 30 bp, Homo sapiens
  source 1..30: mol_type = unassigned DNA
gactttgcaattttctttttcctttctccc

SEQ ID NO: 1145 - DNA, 30 bp, Homo sapiens
  source 1..30: mol_type = unassigned DNA
aaacagcgggatgggaccgctttgactttg

SEQ ID NO: 1146 - DNA, 30 bp, Homo sapiens
  source 1..30: mol_type = unassigned DNA
agcccatttaaggcaaacagttaaggtagc

SEQ ID NO: 1147 - DNA, 30 bp, Homo sapiens
  source 1..30: mol_type = unassigned DNA
aaggcaaacagttaaggtagcttcctcccc

SEQ ID NO: 1148 - DNA, 30 bp, Homo sapiens
  source 1..30: mol_type = unassigned DNA
aggcaaacagttaaggtagcttcctcccct

SEQ ID NO: 1149 - DNA, 30 bp, Homo sapiens
  source 1..30: mol_type = unassigned DNA
aggtagcttcctcccctcacgattgagtcc

SEQ ID NO: 1150 - DNA, 30 bp, Homo sapiens
  source 1..30: mol_type = unassigned DNA
tagagctcaagagaggaggtgagaggtggg

SEQ ID NO: 1151 - DNA, 30 bp, Homo sapiens
  source 1..30: mol_type = unassigned DNA
taaaatatctctgaatgcttctagagctca

SEQ ID NO: 1152 - DNA, 30 bp, Homo sapiens
  source 1..30: mol_type = unassigned DNA
ataaaatatctctgaatgcttctagagctc

SEQ ID NO: 1153 - DNA, 30 bp, Homo sapiens
  source 1..30: mol_type = unassigned DNA
tttataaaatatctctgaatgcttctagag

SEQ ID NO: 1154 - DNA, 30 bp, Homo sapiens
  source 1..30: mol_type = unassigned DNA
ctttataaaatatctctgaatgcttctaga

SEQ ID NO: 1155 - DNA, 30 bp, Homo sapiens
  source 1..30: mol_type = unassigned DNA
tctttataaaatatctctgaatgcttctag

SEQ ID NO: 1156 - DNA, 30 bp, Homo sapiens
  source 1..30: mol_type = unassigned DNA
ttctttataaaatatctctgaatgcttcta

SEQ ID NO: 1157 - DNA, 30 bp, Homo sapiens
  source 1..30: mol_type = unassigned DNA
acatctttttctttataaaatatctctgaa

SEQ ID NO: 1158 - DNA, 30 bp, Homo sapiens
  source 1..30: mol_type = unassigned DNA
ccattaacatctttttctttataaaatatc

SEQ ID NO: 1159 - DNA, 30 bp, Homo sapiens
  source 1..30: mol_type = unassigned DNA
ctggtcctgtgttaccattaacatcttttt

SEQ ID NO: 1160 - DNA, 30 bp, Homo sapiens
  source 1..30: mol_type = unassigned DNA
tctgccctcccacctcccccagaactgccc

SEQ ID NO: 1161 - DNA, 30 bp, Homo sapiens
  source 1..30: mol_type = unassigned DNA
catagacctcttctctgccctcccacctcc

SEQ ID NO: 1162 - DNA, 30 bp, Homo sapiens
  source 1..30: mol_type = unassigned DNA
ccatagacctcttctctgccctcccacctc

SEQ ID NO: 1163 - DNA, 30 bp, Homo sapiens
  source 1..30: mol_type = unassigned DNA
caaacagcgggatgggaccgctttgacttt

SEQ ID NO: 1164 - DNA, 30 bp, Homo sapiens
  source 1..30: mol_type = unassigned DNA
gatttccatagacctcttctctgccctccc

SEQ ID NO: 1165 - DNA, 30 bp, Homo sapiens
  source 1..30: mol_type = unassigned DNA
gctttagatttccatagacctcttctctgc

SEQ ID NO: 1166 - DNA, 30 bp, Homo sapiens
  source 1..30: mol_type = unassigned DNA
ttcgctttagatttccatagacctcttctc

SEQ ID NO: 1167 - DNA, 30 bp, Homo sapiens
  source 1..30: mol_type = unassigned DNA
aaagaaattcttcgctttagatttccatag

SEQ ID NO: 1168 - DNA, 30 bp, Homo sapiens
  source 1..30: mol_type = unassigned DNA
aaaagaaattcttcgctttagatttccata

SEQ ID NO: 1169 - DNA, 30 bp, Homo sapiens
  source 1..30: mol_type = unassigned DNA
taaaagaaattcttcgctttagatttccat

SEQ ID NO: 1170 - DNA, 30 bp, Homo sapiens
  source 1..30: mol_type = unassigned DNA
taccttttaaaagaaattcttcgctttaga

SEQ ID NO: 1171 - DNA, 30 bp, Homo sapiens
  source 1..30: mol_type = unassigned DNA
cccgcttctaccttttaaaagaaattcttc

SEQ ID NO: 1172 - DNA, 30 bp, Homo sapiens
  source 1..30: mol_type = unassigned DNA
tctacccataggagggcaacttacccgctt

SEQ ID NO: 1173 - DNA, 30 bp, Homo sapiens
  source 1..30: mol_type = unassigned DNA
aatatggaaacagaataaattctctaccca

SEQ ID NO: 1174 - DNA, 30 bp, Homo sapiens
  source 1..30: mol_type = unassigned DNA
aaatatggaaacagaataaattctctaccc

SEQ ID NO: 1175 - DNA, 30 bp, Homo sapiens
  source 1..30: mol_type = unassigned DNA
taaatatggaaacagaataaattctctacc

SEQ ID NO: 1176 - DNA, 30 bp, Homo sapiens
  source 1..30: mol_type = unassigned DNA
agtcctaattttaaatatggaaacagaata

SEQ ID NO: 1177 - DNA, 30 bp, Homo sapiens
  source 1..30: mol_type = unassigned DNA
ctcccctcacgattgagtcctaattttaaa

SEQ ID NO: 1178 - DNA, 30 bp, Homo sapiens
  source 1..30: mol_type = unassigned DNA
agatttccatagacctcttctctgccctcc

SEQ ID NO: 1179 - DNA, 30 bp, Homo sapiens
  source 1..30: mol_type = unassigned DNA
tttcagttttatcctgaaattctgaccaaa

SEQ ID NO: 1180 - DNA, 30 bp, Homo sapiens
  source 1..30: mol_type = unassigned DNA
tctccatcccctccccccgtctccacccat

SEQ ID NO: 1181 - DNA, 30 bp, Homo sapiens
  source 1..30: mol_type = unassigned DNA
ttcgacgagacaataccgtaaaatgtgccc

SEQ ID NO: 1182 - DNA, 30 bp, Homo sapiens
  source 1..30: mol_type = unassigned DNA
tatacgatttcatgtcatctctattattat

SEQ ID NO: 1183 - DNA, 30 bp, Homo sapiens
  source 1..30: mol_type = unassigned DNA
atatacgatttcatgtcatctctattatta

SEQ ID NO: 1184 - DNA, 30 bp, Homo sapiens
  source 1..30: mol_type = unassigned DNA
ctttatatacgatttcatgtcatctctatt

SEQ ID NO: 1185 - DNA, 30 bp, Homo sapiens
  source 1..30: mol_type = unassigned DNA
gctttatatacgatttcatgtcatctctat

SEQ ID NO: 1186 - DNA, 30 bp, Homo sapiens
  source 1..30: mol_type = unassigned DNA
tgctttatatacgatttcatgtcatctcta

SEQ ID NO: 1187 - DNA, 30 bp, Homo sapiens
  source 1..30: mol_type = unassigned DNA
acctcttttgctttatatacgatttcatgt

SEQ ID NO: 1188 - DNA, 30 bp, Homo sapiens
  source 1..30: mol_type = unassigned DNA
gacctcttttgctttatatacgatttcatg

SEQ ID NO: 1189 - DNA, 30 bp, Homo sapiens
  source 1..30: mol_type = unassigned DNA
agactttgacctcttttgctttatatacga

SEQ ID NO: 1190 - DNA, 30 bp, Homo sapiens
  source 1..30: mol_type = unassigned DNA
acttaagactttgacctcttttgctttata

SEQ ID NO: 1191 - DNA, 30 bp, Homo sapiens
  source 1..30: mol_type = unassigned DNA
gcgtggcttaacttaagactttgacctctt

SEQ ID NO: 1192 - DNA, 30 bp, Homo sapiens
  source 1..30: mol_type = unassigned DNA
cgcgtggcttaacttaagactttgacctct

SEQ ID NO: 1193 - DNA, 30 bp, Homo sapiens
  source 1..30: mol_type = unassigned DNA
gcactgtctgacccacaaaacggaaatttc

SEQ ID NO: 1194 - DNA, 30 bp, Homo sapiens
  source 1..30: mol_type = unassigned DNA
ggcactgtctgacccacaaaacggaaattt

SEQ ID NO: 1195 - DNA, 30 bp, Homo sapiens
  source 1..30: mol_type = unassigned DNA
ccgatatttggcactgtctgacccacaaaa

SEQ ID NO: 1196 - DNA, 30 bp, Homo sapiens
  source 1..30: mol_type = unassigned DNA
tgaaattgccgatatttggcactgtctgac

SEQ ID NO: 1197 - DNA, 30 bp, Homo sapiens
  source 1..30: mol_type = unassigned DNA
tctctctgagcttatgaaattgccgatatt

SEQ ID NO: 1198 - DNA, 30 bp, Homo sapiens
  source 1..30: mol_type = unassigned DNA
cggtcatcctgtgtctccactgtcttgtct

SEQ ID NO: 1199 - DNA, 30 bp, Homo sapiens
  source 1..30: mol_type = unassigned DNA
ccggtcatcctgtgtctccactgtcttgtc

SEQ ID NO: 1200 - DNA, 30 bp, Homo sapiens
  source 1..30: mol_type = unassigned DNA
tccggtcatcctgtgtctccactgtcttgt

SEQ ID NO: 1201 - DNA, 30 bp, Homo sapiens
  source 1..30: mol_type = unassigned DNA
cggatgaaggccctgaatccagaatctttt

SEQ ID NO: 1202 - DNA, 30 bp, Homo sapiens
  source 1..30: mol_type = unassigned DNA
accccggggccactgagcgccagaaccgtg

SEQ ID NO: 1203 - DNA, 30 bp, Homo sapiens
  source 1..30: mol_type = unassigned DNA
caccccggggccactgagcgccagaaccgt

SEQ ID NO: 1204 - DNA, 30 bp, Homo sapiens
  source 1..30: mol_type = unassigned DNA
tcaccccggggccactgagcgccagaaccg

SEQ ID NO: 1205 - DNA, 30 bp, Homo sapiens
  source 1..30: mol_type = unassigned DNA
cagctgccacaggaccccaggccccaccct

SEQ ID NO: 1206 - DNA, 30 bp, Homo sapiens
  source 1..30: mol_type = unassigned DNA
cctgtctccgcatcctgcaaccaagtcccg

SEQ ID NO: 1207 - DNA, 30 bp, Homo sapiens
  source 1..30: mol_type = unassigned DNA
ccctgtctccgcatcctgcaaccaagtccc

SEQ ID NO: 1208 - DNA, 30 bp, Homo sapiens
  source 1..30: mol_type = unassigned DNA
ggcagctttccctgtctccgcatcctgcaa

SEQ ID NO: 1209 - DNA, 30 bp, Homo sapiens
  source 1..30: mol_type = unassigned DNA
catgtcatctctattattatacatacacat

SEQ ID NO: 1210 - DNA, 30 bp, Homo sapiens
  source 1..30: mol_type = unassigned DNA
atgtcatctctattattatacatacacatg

SEQ ID NO: 1211 - DNA, 30 bp, Homo sapiens
  source 1..30: mol_type = unassigned DNA
ttatacatacacatgtctaggttctagaag

SEQ ID NO: 1212 - DNA, 30 bp, Homo sapiens
  source 1..30: mol_type = unassigned DNA
tacatacacatgtctaggttctagaagctt

SEQ ID NO: 1213 - DNA, 30 bp, Homo sapiens
  source 1..30: mol_type = unassigned DNA
cttcgacgagacaataccgtaaaatgtgcc

SEQ ID NO: 1214 - DNA, 30 bp, Homo sapiens
  source 1..30: mol_type = unassigned DNA
cctccctgcaccgcaccccaggactagcgg

SEQ ID NO: 1215 - DNA, 30 bp, Homo sapiens
  source 1..30: mol_type = unassigned DNA
ccctaaaacaaaggagcggaggtcctaccc

SEQ ID NO: 1216 - DNA, 30 bp, Homo sapiens
  source 1..30: mol_type = unassigned DNA
ccctcccttgccctaaaacaaaggagcgga

SEQ ID NO: 1217 - DNA, 30 bp, Homo sapiens
  source 1..30: mol_type = unassigned DNA
ctctctccttcccctcccttgccctaaaac

SEQ ID NO: 1218 - DNA, 30 bp, Homo sapiens
  source 1..30: mol_type = unassigned DNA
cccgcccctgcagctgcccacccgcgccct

SEQ ID NO: 1219 - DNA, 30 bp, Homo sapiens
  source 1..30: mol_type = unassigned DNA
gaagccgctgtccctccacccctccctgcc

SEQ ID NO: 1220 - DNA, 30 bp, Homo sapiens
  source 1..30: mol_type = unassigned DNA
tgcgcccagcgctgcaggtgcctccccccg

SEQ ID NO: 1221 - DNA, 30 bp, Homo sapiens
  source 1..30: mol_type = unassigned DNA
cgcactgggtggggctgtccgcattgtgcg

SEQ ID NO: 1222 - DNA, 30 bp, Homo sapiens
  source 1..30: mol_type = unassigned DNA
gaatgaagatgcagcaccgggcgggggggc

SEQ ID NO: 1223 - DNA, 30 bp, Homo sapiens
  source 1..30: mol_type = unassigned DNA
cgaatgaagatgcagcaccgggcggggggg

SEQ ID NO: 1224 - DNA, 30 bp, Homo sapiens
  source 1..30: mol_type = unassigned DNA
ggctcctgggtgtcacgctgcgctccccac

SEQ ID NO: 1225 - DNA, 30 bp, Homo sapiens
  source 1..30: mol_type = unassigned DNA
gaagccgcggcggggagtcgggagcgggga

SEQ ID NO: 1226 - DNA, 30 bp, Homo sapiens
  source 1..30: mol_type = unassigned DNA
gacgagacaataccgtaaaatgtgcccagt

SEQ ID NO: 1227 - DNA, 30 bp, Homo sapiens
  source 1..30: mol_type = unassigned DNA
aaagcagaacaatgaggccagcgtggggag

SEQ ID NO: 1228 - DNA, 30 bp, Homo sapiens
  source 1..30: mol_type = unassigned DNA
cccatctctcttaaaagcagaacaatgagg

SEQ ID NO: 1229 - DNA, 30 bp, Homo sapiens
  source 1..30: mol_type = unassigned DNA
tcccatctctcttaaaagcagaacaatgag

SEQ ID NO: 1230 - DNA, 30 bp, Homo sapiens
  source 1..30: mol_type = unassigned DNA
acccacttttcccatctctcttaaaagcag

SEQ ID NO: 1231 - DNA, 30 bp, Homo sapiens
  source 1..30: mol_type = unassigned DNA
cgaaaagaaaaatgttaacccacttttccc

SEQ ID NO: 1232 - DNA, 30 bp, Homo sapiens
  source 1..30: mol_type = unassigned DNA
cttccgaaaagaaaaatgttaacccacttt

SEQ ID NO: 1233 - DNA, 30 bp, Homo sapiens
  source 1..30: mol_type = unassigned DNA
gcttccgaaaagaaaaatgttaacccactt

SEQ ID NO: 1234 - DNA, 30 bp, Homo sapiens
  source 1..30: mol_type = unassigned DNA
tctgtgtctatgtctaaacactctatgtaa

SEQ ID NO: 1235 - DNA, 30 bp, Homo sapiens
  source 1..30: mol_type = unassigned DNA
atctgtgtctatgtctaaacactctatgta

SEQ ID NO: 1236 - DNA, 30 bp, Homo sapiens
  source 1..30: mol_type = unassigned DNA
aaagaaccctttatctgtgtctatgtctaa

SEQ ID NO: 1237 - DNA, 30 bp, Homo sapiens
  source 1..30: mol_type = unassigned DNA
ccgcaaacgatcaaaggtcttcaaagaacc

SEQ ID NO: 1238 - DNA, 30 bp, Homo sapiens
  source 1..30: mol_type = unassigned DNA
cccgcaaacgatcaaaggtcttcaaagaac

SEQ ID NO: 1239 - DNA, 30 bp, Homo sapiens
  source 1..30: mol_type = unassigned DNA
tcccgcaaacgatcaaaggtcttcaaagaa

SEQ ID NO: 1240 - DNA, 30 bp, Homo sapiens
  source 1..30: mol_type = unassigned DNA
tagaagcttttcccgcaaacgatcaaaggt

SEQ ID NO: 1241 - DNA, 30 bp, Homo sapiens
  source 1..30: mol_type = unassigned DNA
ccatctctcttaaaagcagaacaatgaggc

SEQ ID NO: 1242 - DNA, 30 bp, Homo sapiens
  source 1..30: mol_type = unassigned DNA
tgtaaagattaccatagatttaaaaatgtt

SEQ ID NO: 1243 - DNA, 30 bp, Homo sapiens
  source 1..30: mol_type = unassigned DNA
ctttcagttttatcctgaaattctgaccaa

SEQ ID NO: 1244 - DNA, 30 bp, Homo sapiens
  source 1..30: mol_type = unassigned DNA
attgataaactactgccatttctttcagtt

SEQ ID NO: 1245 - DNA, 30 bp, Homo sapiens
  source 1..30: mol_type = unassigned DNA
tactatttatccactacaaaatctcagaag

SEQ ID NO: 1246 - DNA, 30 bp, Homo sapiens
  source 1..30: mol_type = unassigned DNA
ctactatttatccactacaaaatctcagaa

SEQ ID NO: 1247 - DNA, 30 bp, Homo sapiens
  source 1..30: mol_type = unassigned DNA
tctactatttatccactacaaaatctcaga

SEQ ID NO: 1248 - DNA, 30 bp, Homo sapiens
  source 1..30: mol_type = unassigned DNA
ttctactatttatccactacaaaatctcag

SEQ ID NO: 1249 - DNA, 30 bp, Homo sapiens
  source 1..30: mol_type = unassigned DNA
ctactgacatttttctactatttatccact

SEQ ID NO: 1250 - DNA, 30 bp, Homo sapiens
  source 1..30: mol_type = unassigned DNA
ctattactactgacatttttctactattta

SEQ ID NO: 1251 - DNA, 30 bp, Homo sapiens
  source 1..30: mol_type = unassigned DNA
gctattactactgacatttttctactattt

SEQ ID NO: 1252 - DNA, 30 bp, Homo sapiens
  source 1..30: mol_type = unassigned DNA
ggctgctaaataactttgctattactactg

SEQ ID NO: 1253 - DNA, 30 bp, Homo sapiens
  source 1..30: mol_type = unassigned DNA
aaatattcggctgctaaataactttgctat

SEQ ID NO: 1254 - DNA, 30 bp, Homo sapiens
  source 1..30: mol_type = unassigned DNA
agcattaaaatattcggctgctaaataact

SEQ ID NO: 1255 - DNA, 30 bp, Homo sapiens
  source 1..30: mol_type = unassigned DNA
aagcattaaaatattcggctgctaaataac

SEQ ID NO: 1256 - DNA, 30 bp, Homo sapiens
  source 1..30: mol_type = unassigned DNA
taagcattaaaatattcggctgctaaataa

SEQ ID NO: 1257 - DNA, 30 bp, Homo sapiens
  source 1..30: mol_type = unassigned DNA
ttaagcattaaaatattcggctgctaaata

SEQ ID NO: 1258 - DNA, 30 bp, Homo sapiens
  source 1..30: mol_type = unassigned DNA
tttttaagcattaaaatattcggctgctaa

SEQ ID NO: 1259 - DNA, 30 bp, Homo sapiens
  source 1..30: mol_type = unassigned DNA
atttttaagcattaaaatattcggctgcta

SEQ ID NO: 1260 - DNA, 30 bp, Homo sapiens
  source 1..30: mol_type = unassigned DNA
ctttatttttaagcattaaaatattcggct

SEQ ID NO: 1261 - DNA, 30 bp, Homo sapiens
  source 1..30: mol_type = unassigned DNA
ttcctttatttttaagcattaaaatattcg

SEQ ID NO: 1262 - DNA, 30 bp, Homo sapiens
  source 1..30: mol_type = unassigned DNA
attcctttatttttaagcattaaaatattc

SEQ ID NO: 1263 - DNA, 30 bp, Homo sapiens
  source 1..30: mol_type = unassigned DNA
atttattcctttatttttaagcattaaaat

SEQ ID NO: 1264 - DNA, 30 bp, Homo sapiens
  source 1..30: mol_type = unassigned DNA
aatttattcctttatttttaagcattaaaa

SEQ ID NO: 1265 - DNA, 30 bp, Homo sapiens
  source 1..30: mol_type = unassigned DNA
tttaatttattcctttatttttaagcatta

SEQ ID NO: 1266 - DNA, 30 bp, Homo sapiens
  source 1..30: mol_type = unassigned DNA
ctttaatttattcctttatttttaagcatt

SEQ ID NO: 1267 - DNA, 30 bp, Homo sapiens
  source 1..30: mol_type = unassigned DNA
tctttaatttattcctttatttttaagcat

SEQ ID NO: 1268 - DNA, 30 bp, Homo sapiens
  source 1..30: mol_type = unassigned DNA
caatcgatgaagaagtaaacaatgattttc

SEQ ID NO: 1269 - DNA, 30 bp, Homo sapiens
  source 1..30: mol_type = unassigned DNA
agatgtgctctgaacagggggcacatttca

SEQ ID NO: 1270 - DNA, 30 bp, Homo sapiens
  source 1..30: mol_type = unassigned DNA
tctgcaggtggagactctgatattcagatg

SEQ ID NO: 1271 - DNA, 30 bp, Homo sapiens
  source 1..30: mol_type = unassigned DNA
ctcgctaagctgcatgttctctgcaggtgg

SEQ ID NO: 1272 - DNA, 30 bp, Homo sapiens
  source 1..30: mol_type = unassigned DNA
atccactacaaaatctcagaagtaacataa

SEQ ID NO: 1273 - DNA, 30 bp, Homo sapiens
  source 1..30: mol_type = unassigned DNA
actcgctaagctgcatgttctctgcaggtg

SEQ ID NO: 1274 - DNA, 30 bp, Homo sapiens
  source 1..30: mol_type = unassigned DNA
tccactacaaaatctcagaagtaacataaa

SEQ ID NO: 1275 - DNA, 30 bp, Homo sapiens
  source 1..30: mol_type = unassigned DNA
accagggcgtgtatctactttcagattatg

SEQ ID NO: 1276 - DNA, 30 bp, Homo sapiens
  source 1..30: mol_type = unassigned DNA
ccctctagtgtggtgaaaagttaatgcaga

SEQ ID NO: 1277 - DNA, 30 bp, Homo sapiens
  source 1..30: mol_type = unassigned DNA
gagaacatgattgccctctagtgtggtgaa

SEQ ID NO: 1278 - DNA, 30 bp, Homo sapiens
  source 1..30: mol_type = unassigned DNA
agagaacatgattgccctctagtgtggtga

SEQ ID NO: 1279 - DNA, 30 bp, Homo sapiens
  source 1..30: mol_type = unassigned DNA
tagagaacatgattgccctctagtgtggtg

SEQ ID NO: 1280 - DNA, 30 bp, Homo sapiens
  source 1..30: mol_type = unassigned DNA
ttagagaacatgattgccctctagtgtggt

SEQ ID NO: 1281 - DNA, 30 bp, Homo sapiens
  source 1..30: mol_type = unassigned DNA
tttagagaacatgattgccctctagtgtgg

SEQ ID NO: 1282 - DNA, 30 bp, Homo sapiens
  source 1..30: mol_type = unassigned DNA
catcaatcatctgcttttttagagaacatg

SEQ ID NO: 1283 - DNA, 30 bp, Homo sapiens
  source 1..30: mol_type = unassigned DNA
acatcaatcatctgcttttttagagaacat

SEQ ID NO: 1284 - DNA, 30 bp, Homo sapiens
  source 1..30: mol_type = unassigned DNA
gaactaggtttacatcaatcatctgctttt

SEQ ID NO: 1285 - DNA, 30 bp, Homo sapiens
  source 1..30: mol_type = unassigned DNA
ggaactaggtttacatcaatcatctgcttt

SEQ ID NO: 1286 - DNA, 30 bp, Homo sapiens
  source 1..30: mol_type = unassigned DNA
atatttggaactaggtttacatcaatcatc

SEQ ID NO: 1287 - DNA, 30 bp, Homo sapiens
  source 1..30: mol_type = unassigned DNA
aacagttaatatttggaactaggtttacat

SEQ ID NO: 1288 - DNA, 30 bp, Homo sapiens
  source 1..30: mol_type = unassigned DNA
ttaaacagttaatatttggaactaggttta

SEQ ID NO: 1289 - DNA, 30 bp, Homo sapiens
  source 1..30: mol_type = unassigned DNA
attaaacagttaatatttggaactaggttt

SEQ ID NO: 1290 - DNA, 30 bp, Homo sapiens
  source 1..30: mol_type = unassigned DNA
tattaaacagttaatatttggaactaggtt

SEQ ID NO: 1291 - DNA, 30 bp, Homo sapiens
  source 1..30: mol_type = unassigned DNA
ctggtaaaagaaaagattttattaaacagt

SEQ ID NO: 1292 - DNA, 30 bp, Homo sapiens
  source 1..30: mol_type = unassigned DNA
aatgttcctggtaaaagaaaagattttatt

SEQ ID NO: 1293 - DNA, 30 bp, Homo sapiens
  source 1..30: mol_type = unassigned DNA
aataaacacttgaatgttcctggtaaaaga

SEQ ID NO: 1294 - DNA, 30 bp, Homo sapiens
  source 1..30: mol_type = unassigned DNA
ttgaataaacacttgaatgttcctggtaaa

SEQ ID NO: 1295 - DNA, 30 bp, Homo sapiens
  source 1..30: mol_type = unassigned DNA
atccactagggtaaagcatggcatcagctt

SEQ ID NO: 1296 - DNA, 30 bp, Homo sapiens
  source 1..30: mol_type = unassigned DNA
tacaagctctgttcatccactagggtaaag

SEQ ID NO: 1297 - DNA, 30 bp, Homo sapiens
  source 1..30: mol_type = unassigned DNA
aaaattgtacaagctctgttcatccactag

SEQ ID NO: 1298 - DNA, 30 bp, Homo sapiens
  source 1..30: mol_type = unassigned DNA
atcctgtctccttgaaaattgtacaagctc

SEQ ID NO: 1299 - DNA, 30 bp, Homo sapiens
  source 1..30: mol_type = unassigned DNA
catcctgtctccttgaaaattgtacaagct

SEQ ID NO: 1300 - DNA, 30 bp, Homo sapiens
  source 1..30: mol_type = unassigned DNA
tgaccactcatttcatcctgtctccttgaa

SEQ ID NO: 1301 - DNA, 30 bp, Homo sapiens
  source 1..30: mol_type = unassigned DNA
agattatgaccactcatttcatcctgtctc

SEQ ID NO: 1302 - DNA, 30 bp, Homo sapiens
  source 1..30: mol_type = unassigned DNA
cagattatgaccactcatttcatcctgtct

SEQ ID NO: 1303 - DNA, 30 bp, Homo sapiens
  source 1..30: mol_type = unassigned DNA
taataacaatgtaataaaactgagaagtaa

SEQ ID NO: 1304 - DNA, 30 bp, Homo sapiens
  source 1..30: mol_type = unassigned DNA
tactcgctaagctgcatgttctctgcaggt

SEQ ID NO: 1305 - DNA, 30 bp, Homo sapiens
  source 1..30: mol_type = unassigned DNA
gtacacctcctcagtatcacatacctgcct

SEQ ID NO: 1306 - DNA, 30 bp, Homo sapiens
  source 1..30: mol_type = unassigned DNA
ggtacacctcctcagtatcacatacctgcc

SEQ ID NO: 1307 - DNA, 30 bp, Homo sapiens
  source 1..30: mol_type = unassigned DNA
cataaaatgtaatcaaaaaataattctatc

SEQ ID NO: 1308 - DNA, 30 bp, Homo sapiens
  source 1..30: mol_type = unassigned DNA
gaattacataaaatgtaatcaaaaaataat

SEQ ID NO: 1309 - DNA, 30 bp, Homo sapiens
  source 1..30: mol_type = unassigned DNA
tagctggattagaattacataaaatgtaat

SEQ ID NO: 1310 - DNA, 30 bp, Homo sapiens
  source 1..30: mol_type = unassigned DNA
atagctggattagaattacataaaatgtaa

SEQ ID NO: 1311 - DNA, 30 bp, Homo sapiens
  source 1..30: mol_type = unassigned DNA
tatagctggattagaattacataaaatgta

SEQ ID NO: 1312 - DNA, 30 bp, Homo sapiens
  source 1..30: mol_type = unassigned DNA
aatattttatagctggattagaattacata

SEQ ID NO: 1313 - DNA, 30 bp, Homo sapiens
  source 1..30: mol_type = unassigned DNA
aggaacacagtaatatgacactattaaata

SEQ ID NO: 1314 - DNA, 30 bp, Homo sapiens
  source 1..30: mol_type = unassigned DNA
gaggaacacagtaatatgacactattaaat

SEQ ID NO: 1315 - DNA, 30 bp, Homo sapiens
  source 1..30: mol_type = unassigned DNA
atatgcacatcaaagtttgaggaacacagt

SEQ ID NO: 1316 - DNA, 30 bp, Homo sapiens
  source 1..30: mol_type = unassigned DNA
atgaaaatcaaaggtaattcatatgcacat

SEQ ID NO: 1317 - DNA, 30 bp, Homo sapiens
  source 1..30: mol_type = unassigned DNA
aatgaaaatcaaaggtaattcatatgcaca

SEQ ID NO: 1318 - DNA, 30 bp, Homo sapiens
  source 1..30: mol_type = unassigned DNA
taatgaaaatcaaaggtaattcatatgcac

SEQ ID NO: 1319 - DNA, 30 bp, Homo sapiens
  source 1..30: mol_type = unassigned DNA
cattttaatgaaaatcaaaggtaattcata

SEQ ID NO: 1320 - DNA, 30 bp, Homo sapiens
  source 1..30: mol_type = unassigned DNA
gcattttaatgaaaatcaaaggtaattcat

SEQ ID NO: 1321 - DNA, 30 bp, Homo sapiens
  source 1..30: mol_type = unassigned DNA
aatcagaatttgcattttaatgaaaatcaa

SEQ ID NO: 1322 - DNA, 30 bp, Homo sapiens
  source 1..30: mol_type = unassigned DNA
ggaagacagaatgtctgcctcaagccagat

SEQ ID NO: 1323 - DNA, 30 bp, Homo sapiens
  source 1..30: mol_type = unassigned DNA
ttcggaagacagaatgtctgcctcaagcca

SEQ ID NO: 1324 - DNA, 30 bp, Homo sapiens
  source 1..30: mol_type = unassigned DNA
gtggtcagaatcagcatcatctgggagctt

SEQ ID NO: 1325 - DNA, 30 bp, Homo sapiens
  source 1..30: mol_type = unassigned DNA
agtggtcagaatcagcatcatctgggagct

SEQ ID NO: 1326 - DNA, 30 bp, Homo sapiens
  source 1..30: mol_type = unassigned DNA
atatccctaaaactgatgtgtttagtggtc

SEQ ID NO: 1327 - DNA, 30 bp, Homo sapiens
  source 1..30: mol_type = unassigned DNA
caagttaatatccctaaaactgatgtgttt

SEQ ID NO: 1328 - DNA, 30 bp, Homo sapiens
  source 1..30: mol_type = unassigned DNA
ccaggagggatacctgtatattacaagtta

SEQ ID NO: 1329 - DNA, 30 bp, Homo sapiens
  source 1..30: mol_type = unassigned DNA
agacataataccagagcttaccaggaggga

SEQ ID NO: 1330 - DNA, 30 bp, Homo sapiens
  source 1..30: mol_type = unassigned DNA
aaaatgttaagacataataccagagcttac

SEQ ID NO: 1331 - DNA, 30 bp, Homo sapiens
  source 1..30: mol_type = unassigned DNA
aaaaatgttaagacataataccagagctta

SEQ ID NO: 1332 - DNA, 30 bp, Homo sapiens
  source 1..30: mol_type = unassigned DNA
ccatagatttaaaaatgttaagacataata

SEQ ID NO: 1333 - DNA, 30 bp, Homo sapiens
  source 1..30: mol_type = unassigned DNA
taaagattaccatagatttaaaaatgttaa

SEQ ID NO: 1334 - DNA, 30 bp, Homo sapiens
  source 1..30: mol_type = unassigned DNA
tatcaatgcatatttaaaaaatccactttt

SEQ ID NO: 1335 - DNA, 30 bp, Homo sapiens
  source 1..30: mol_type = unassigned DNA
aaaaaatccacttttgatgatacccaaaat

SEQ ID NO: 1336 - DNA, 30 bp, Homo sapiens
  source 1..30: mol_type = unassigned DNA
aaaaatccacttttgatgatacccaaaatt

SEQ ID NO: 1337 - DNA, 30 bp, Homo sapiens
  source 1..30: mol_type = unassigned DNA
tgatgatacccaaaattagtttatacttat

SEQ ID NO: 1338 - DNA, 30 bp, Homo sapiens
  source 1..30: mol_type = unassigned DNA
tggtacacctcctcagtatcacatacctgc

SEQ ID NO: 1339 - DNA, 30 bp, Homo sapiens
  source 1..30: mol_type = unassigned DNA
ttggtacacctcctcagtatcacatacctg

SEQ ID NO: 1340 - DNA, 30 bp, Homo sapiens
  source 1..30: mol_type = unassigned DNA
gaagatgggaaaaataacagcagtcagttt

SEQ ID NO: 1341 - DNA, 30 bp, Homo sapiens
  source 1..30: mol_type = unassigned DNA
aatggaaaagaaagacagacttagaagatg

SEQ ID NO: 1342 - DNA, 30 bp, Homo sapiens
  source 1..30: mol_type = unassigned DNA
aaatggaaaagaaagacagacttagaagat

SEQ ID NO: 1343 - DNA, 30 bp, Homo sapiens
  source 1..30: mol_type = unassigned DNA
aaaaggtatctttaaatggaaaagaaagac

SEQ ID NO: 1344 - DNA, 30 bp, Homo sapiens
  source 1..30: mol_type = unassigned DNA
aaaaaggtatctttaaatggaaaagaaaga

SEQ ID NO: 1345 - DNA, 30 bp, Homo sapiens
  source 1..30: mol_type = unassigned DNA
gatttaaaaaggtatctttaaatggaaaag

SEQ ID NO: 1346 - DNA, 30 bp, Homo sapiens
  source 1..30: mol_type = unassigned DNA
gattagatttaaaaaggtatctttaaatgg

SEQ ID NO: 1347 - DNA, 30 bp, Homo sapiens
  source 1..30: mol_type = unassigned DNA
aaatcacattggattagatttaaaaaggta

SEQ ID NO: 1348 - DNA, 30 bp, Homo sapiens
  source 1..30: mol_type = unassigned DNA
aaatctgataaaactagattgaaatcacat

SEQ ID NO: 1349 - DNA, 30 bp, Homo sapiens
  source 1..30: mol_type = unassigned DNA
ttgaaatctgataaaactagattgaaatca

SEQ ID NO: 1350 - DNA, 30 bp, Homo sapiens
  source 1..30: mol_type = unassigned DNA
taataaacagaaaaccactacaaggagatg

SEQ ID NO: 1351 - DNA, 30 bp, Homo sapiens
  source 1..30: mol_type = unassigned DNA
atgcagacaccgaggttttccaatggacag

SEQ ID NO: 1352 - DNA, 30 bp, Homo sapiens
  source 1..30: mol_type = unassigned DNA
ctaataaacagaaaaccactacaaggagat

SEQ ID NO: 1353 - DNA, 30 bp, Homo sapiens
  source 1..30: mol_type = unassigned DNA
acatcgattttctaataaacagaaaaccac

SEQ ID NO: 1354 - DNA, 30 bp, Homo sapiens
  source 1..30: mol_type = unassigned DNA
aaattaacatcgattttctaataaacagaa

SEQ ID NO: 1355 - DNA, 30 bp, Homo sapiens
  source 1..30: mol_type = unassigned DNA
gttaaaattaacatcgattttctaataaac

SEQ ID NO: 1356 - DNA, 30 bp, Homo sapiens
  source 1..30: mol_type = unassigned DNA
cttcgttaaaattaacatcgattttctaat

SEQ ID NO: 1357 - DNA, 30 bp, Homo sapiens
  source 1..30: mol_type = unassigned DNA
ttacttcgttaaaattaacatcgattttct

SEQ ID NO: 1358 - DNA, 30 bp, Homo sapiens
  source 1..30: mol_type = unassigned DNA
ttcttacttcgttaaaattaacatcgattt

SEQ ID NO: 1359 - DNA, 30 bp, Homo sapiens
  source 1..30: mol_type = unassigned DNA
cttcttacttcgttaaaattaacatcgatt

SEQ ID NO: 1360 - DNA, 30 bp, Homo sapiens
  source 1..30: mol_type = unassigned DNA
tatatttcttcttacttcgttaaaattaac

SEQ ID NO: 1361 - DNA, 30 bp, Homo sapiens
  source 1..30: mol_type = unassigned DNA
tacttatatatttcttcttacttcgttaaa

SEQ ID NO: 1362 - DNA, 30 bp, Homo sapiens
  source 1..30: mol_type = unassigned DNA
atacttatatatttcttcttacttcgttaa

SEQ ID NO: 1363 - DNA, 30 bp, Homo sapiens
  source 1..30: mol_type = unassigned DNA
gtttatacttatatatttcttcttacttcg

SEQ ID NO: 1364 - DNA, 30 bp, Homo sapiens
  source 1..30: mol_type = unassigned DNA
atgatacccaaaattagtttatacttatat

SEQ ID NO: 1365 - DNA, 30 bp, Homo sapiens
  source 1..30: mol_type = unassigned DNA
gatgatacccaaaattagtttatacttata

SEQ ID NO: 1366 - DNA, 30 bp, Homo sapiens
  source 1..30: mol_type = unassigned DNA
tctaataaacagaaaaccactacaaggaga

SEQ ID NO: 1367 - DNA, 30 bp, Homo sapiens
  source 1..30: mol_type = unassigned DNA
tccaatggacagaaccagtctaggttctga

SEQ ID NO: 1368 - DNA, 30 bp, Homo sapiens
  source 1..30: mol_type = unassigned DNA
ccaatggacagaaccagtctaggttctgaa

SEQ ID NO: 1369 - DNA, 30 bp, Homo sapiens
  source 1..30: mol_type = unassigned DNA
caatggacagaaccagtctaggttctgaaa

SEQ ID NO: 1370 - DNA, 30 bp, Homo sapiens
  source 1..30: mol_type = unassigned DNA
agaatagaataatttactacaaatctgtaa

SEQ ID NO: 1371 - DNA, 30 bp, Homo sapiens
  source 1..30: mol_type = unassigned DNA
tagaatagaataatttactacaaatctgta

SEQ ID NO: 1372 - DNA, 30 bp, Homo sapiens
  source 1..30: mol_type = unassigned DNA
tcttttagaatagaataatttactacaaat

SEQ ID NO: 1373 - DNA, 30 bp, Homo sapiens
  source 1..30: mol_type = unassigned DNA
ctcttttagaatagaataatttactacaaa

SEQ ID NO: 1374 - DNA, 30 bp, Homo sapiens
  source 1..30: mol_type = unassigned DNA
atgaggtaatagctgtaacaataaaaacac

SEQ ID NO: 1375 - DNA, 30 bp, Homo sapiens
  source 1..30: mol_type = unassigned DNA
ctaaaaatattaatgaggtaatagctgtaa

SEQ ID NO: 1376 - DNA, 30 bp, Homo sapiens
  source 1..30: mol_type = unassigned DNA
gctaaaaatattaatgaggtaatagctgta

SEQ ID NO: 1377 - DNA, 30 bp, Homo sapiens
  source 1..30: mol_type = unassigned DNA
aatgcaacaaataaaagtttgctaaaaata

SEQ ID NO: 1378 - DNA, 30 bp, Homo sapiens
  source 1..30: mol_type = unassigned DNA
caatgcaacaaataaaagtttgctaaaaat

SEQ ID NO: 1379 - DNA, 30 bp, Homo sapiens
  source 1..30: mol_type = unassigned DNA
aaactgctttcaatgcaacaaataaaagtt

SEQ ID NO: 1380 - DNA, 30 bp, Homo sapiens
  source 1..30: mol_type = unassigned DNA
aaaaataaaaacccaaagtaattaaaactg

SEQ ID NO: 1381 - DNA, 30 bp, Homo sapiens
  source 1..30: mol_type = unassigned DNA
gaaaaataaaaacccaaagtaattaaaact

SEQ ID NO: 1382 - DNA, 30 bp, Homo sapiens
  source 1..30: mol_type = unassigned DNA
gtaatttgaaaaataaaaacccaaagtaat

SEQ ID NO: 1383 - DNA, 30 bp, Homo sapiens
  source 1..30: mol_type = unassigned DNA
caccatctatccattagtaatttgaaaaat

SEQ ID NO: 1384 - DNA, 30 bp, Homo sapiens
  source 1..30: mol_type = unassigned DNA
ttccaccatctatccattagtaatttgaaa

SEQ ID NO: 1385 - DNA, 30 bp, Homo sapiens
  source 1..30: mol_type = unassigned DNA
aatgcttattccaccatctatccattagta

SEQ ID NO: 1386 - DNA, 30 bp, Homo sapiens
  source 1..30: mol_type = unassigned DNA
tgccaaatgattaaatgcttattccaccat

SEQ ID NO: 1387 - DNA, 30 bp, Homo sapiens
  source 1..30: mol_type = unassigned DNA
atggaagtcatattgtgccaaatgattaaa

SEQ ID NO: 1388 - DNA, 30 bp, Homo sapiens
  source 1..30: mol_type = unassigned DNA
gatggaagtcatattgtgccaaatgattaa

SEQ ID NO: 1389 - DNA, 30 bp, Homo sapiens
  source 1..30: mol_type = unassigned DNA
atcactgagaatgagctatttgatggaagt

SEQ ID NO: 1390 - DNA, 30 bp, Homo sapiens
  source 1..30: mol_type = unassigned DNA
aatcactgagaatgagctatttgatggaag

SEQ ID NO: 1391 - DNA, 30 bp, Homo sapiens
  source 1..30: mol_type = unassigned DNA
taatcactgagaatgagctatttgatggaa

SEQ ID NO: 1392 - DNA, 30 bp, Homo sapiens
  source 1..30: mol_type = unassigned DNA
ttaatcactgagaatgagctatttgatgga

SEQ ID NO: 1393 - DNA, 30 bp, Homo sapiens
  source 1..30: mol_type = unassigned DNA
tttaatcactgagaatgagctatttgatgg

SEQ ID NO: 1394 - DNA, 30 bp, Homo sapiens
  source 1..30: mol_type = unassigned DNA
tagcattttttaatcactgagaatgagcta

SEQ ID NO: 1395 - DNA, 30 bp, Homo sapiens
  source 1..30: mol_type = unassigned DNA
tagcctcttgtagcattttttaatcactga

SEQ ID NO: 1396 - DNA, 30 bp, Homo sapiens
  source 1..30: mol_type = unassigned DNA
ctgaatctgagtaaattgtagcctcttgta

SEQ ID NO: 1397 - DNA, 30 bp, Homo sapiens
  source 1..30: mol_type = unassigned DNA
gaatagaataatttactacaaatctgtaag

SEQ ID NO: 1398 - DNA, 30 bp, Homo sapiens
  source 1..30: mol_type = unassigned DNA
actacaaatctgtaagtcacattattgtaa

SEQ ID NO: 1399 - DNA, 30 bp, Homo sapiens
  source 1..30: mol_type = unassigned DNA
ctacaaatctgtaagtcacattattgtaaa

SEQ ID NO: 1400 - DNA, 30 bp, Homo sapiens
  source 1..30: mol_type = unassigned DNA
ttgtaaaaaaaaaccattgtgaattttgac

SEQ ID NO: 1401 - DNA, 30 bp, Homo sapiens
  source 1..30: mol_type = unassigned DNA
ctcacctggtataaactaaatacatgagat

SEQ ID NO: 1402 - DNA, 30 bp, Homo sapiens
  source 1..30: mol_type = unassigned DNA
caggctcagcttactcacctggtataaact

SEQ ID NO: 1403 - DNA, 30 bp, Homo sapiens
  source 1..30: mol_type = unassigned DNA
ttgcaggctcagcttactcacctggtataa

SEQ ID NO: 1404 - DNA, 30 bp, Homo sapiens
  source 1..30: mol_type = unassigned DNA
attgcaggctcagcttactcacctggtata

SEQ ID NO: 1405 - DNA, 30 bp, Homo sapiens
  source 1..30: mol_type = unassigned DNA
cactgggacagagagtgtttattgcaggct

SEQ ID NO: 1406 - DNA, 30 bp, Homo sapiens
  source 1..30: mol_type = unassigned DNA
tagctacctgcgacgtgttacactgggaca

SEQ ID NO: 1407 - DNA, 30 bp, Homo sapiens
  source 1..30: mol_type = unassigned DNA
tcctatcattctagctacctgcgacgtgtt

SEQ ID NO: 1408 - DNA, 30 bp, Homo sapiens
  source 1..30: mol_type = unassigned DNA
atcctatcattctagctacctgcgacgtgt

SEQ ID NO: 1409 - DNA, 30 bp, Homo sapiens
  source 1..30: mol_type = unassigned DNA
atttatcctatcattctagctacctgcgac

SEQ ID NO: 1410 - DNA, 30 bp, Homo sapiens
  source 1..30: mol_type = unassigned DNA
acgtgcatagacaaacaccacaaggtctat

SEQ ID NO: 1411 - DNA, 30 bp, Homo sapiens
  source 1..30: mol_type = unassigned DNA
aacgtgcatagacaaacaccacaaggtcta

SEQ ID NO: 1412 - DNA, 30 bp, Homo sapiens
  source 1..30: mol_type = unassigned DNA
taacgtgcatagacaaacaccacaaggtct

SEQ ID NO: 1413 - DNA, 30 bp, Homo sapiens
  source 1..30: mol_type = unassigned DNA
tctcagagaattttaacgtgcatagacaaa

SEQ ID NO: 1414 - DNA, 30 bp, Homo sapiens
  source 1..30: mol_type = unassigned DNA
cctgaatctgagtaaattgtagcctcttgt

SEQ ID NO: 1415 - DNA, 30 bp, Homo sapiens
  source 1..30: mol_type = unassigned DNA
ctctcagagaattttaacgtgcatagacaa

SEQ ID NO: 1416 - DNA, 30 bp, Homo sapiens
  source 1..30: mol_type = unassigned DNA
aaaatatactttctctcagagaattttaac

SEQ ID NO: 1417 - DNA, 30 bp, Homo sapiens
  source 1..30: mol_type = unassigned DNA
taaaatatactttctctcagagaattttaa

SEQ ID NO: 1418 - DNA, 30 bp, Homo sapiens
  source 1..30: mol_type = unassigned DNA
tcattttaaaatatactttctctcagagaa

SEQ ID NO: 1419 - DNA, 30 bp, Homo sapiens
  source 1..30: mol_type = unassigned DNA
attatcattttaaaatatactttctctcag

SEQ ID NO: 1420 - DNA, 30 bp, Homo sapiens
  source 1..30: mol_type = unassigned DNA
atagcacaaatgtccaatcttaattatcat

SEQ ID NO: 1421 - DNA, 30 bp, Homo sapiens
  source 1..30: mol_type = unassigned DNA
aatagcacaaatgtccaatcttaattatca

SEQ ID NO: 1422 - DNA, 30 bp, Homo sapiens
  source 1..30: mol_type = unassigned DNA
taatagcacaaatgtccaatcttaattatc

SEQ ID NO: 1423 - DNA, 30 bp, Homo sapiens
  source 1..30: mol_type = unassigned DNA
tagattttaatagcacaaatgtccaatctt

SEQ ID NO: 1424 - DNA, 30 bp, Homo sapiens
  source 1..30: mol_type = unassigned DNA
actaaagttgtagattttaatagcacaaat

SEQ ID NO: 1425 - DNA, 30 bp, Homo sapiens
  source 1..30: mol_type = unassigned DNA
gactaaagttgtagattttaatagcacaaa

SEQ ID NO: 1426 - DNA, 30 bp, Homo sapiens
  source 1..30: mol_type = unassigned DNA
tgactaaagttgtagattttaatagcacaa

SEQ ID NO: 1427 - DNA, 30 bp, Homo sapiens
  source 1..30: mol_type = unassigned DNA
tgaattttgactaaagttgtagattttaat

SEQ ID NO: 1428 - DNA, 30 bp, Homo sapiens
  source 1..30: mol_type = unassigned DNA
taaaaaaaaaccattgtgaattttgactaa

SEQ ID NO: 1429 - DNA, 30 bp, Homo sapiens
  source 1..30: mol_type = unassigned DNA
aaatatactttctctcagagaattttaacg

SEQ ID NO: 1430 - DNA, 30 bp, Homo sapiens
  source 1..30: mol_type = unassigned DNA
ataaactactgccatttctttcagttttat

SEQ ID NO: 1431 - DNA, 30 bp, Homo sapiens
  source 1..30: mol_type = unassigned DNA
tggcactctgaaaggacatttcctgaatct

SEQ ID NO: 1432 - DNA, 30 bp, Homo sapiens
  source 1..30: mol_type = unassigned DNA
ttatatgaatcagccttatggcactctgaa

SEQ ID NO: 1433 - DNA, 30 bp, Homo sapiens
  source 1..30: mol_type = unassigned DNA
tttcagcctcctgtgagcaatgagctacca

SEQ ID NO: 1434 - DNA, 30 bp, Homo sapiens
  source 1..30: mol_type = unassigned DNA
ctcctgctcggaggccagcttttttcagcc

SEQ ID NO: 1435 - DNA, 30 bp, Homo sapiens
  source 1..30: mol_type = unassigned DNA
tgctctgagcttcctcctgctcggaggcca

SEQ ID NO: 1436 - DNA, 30 bp, Homo sapiens
  source 1..30: mol_type = unassigned DNA
gtgctctgagcttcctcctgctcggaggcc

SEQ ID NO: 1437 - DNA, 30 bp, Homo sapiens
  source 1..30: mol_type = unassigned DNA
gctatcagcagctcccagtggccacgccca

SEQ ID NO: 1438 - DNA, 30 bp, Homo sapiens
  source 1..30: mol_type = unassigned DNA
ccacgaccaaaaaagaaactggtgtgagct

SEQ ID NO: 1439 - DNA, 30 bp, Homo sapiens
  source 1..30: mol_type = unassigned DNA
ttcccacgaccaaaaaagaaactggtgtga

SEQ ID NO: 1440 - DNA, 30 bp, Homo sapiens
  source 1..30: mol_type = unassigned DNA
cttcccacgaccaaaaaagaaactggtgtg

SEQ ID NO: 1441 - DNA, 30 bp, Homo sapiens
  source 1..30: mol_type = unassigned DNA
tcttcccacgaccaaaaaagaaactggtgt

SEQ ID NO: 1442 - DNA, 30 bp, Homo sapiens
  source 1..30: mol_type = unassigned DNA
ttcttcccacgaccaaaaaagaaactggtg

SEQ ID NO: 1443 - DNA, 30 bp, Homo sapiens
  source 1..30: mol_type = unassigned DNA
tgacaacaggataatatgtgtttttcttcc

SEQ ID NO: 1444 - DNA, 30 bp, Homo sapiens
  source 1..30: mol_type = unassigned DNA
atataaggtcacagatcttgtgacaacagg

SEQ ID NO: 1445 - DNA, 30 bp, Homo sapiens
  source 1..30: mol_type = unassigned DNA
catataaggtcacagatcttgtgacaacag

SEQ ID NO: 1446 - DNA, 30 bp, Homo sapiens
  source 1..30: mol_type = unassigned DNA
tcatataaggtcacagatcttgtgacaaca

SEQ ID NO: 1447 - DNA, 30 bp, Homo sapiens
  source 1..30: mol_type = unassigned DNA
ttcatataaggtcacagatcttgtgacaac

SEQ ID NO: 1448 - DNA, 30 bp, Homo sapiens
  source 1..30: mol_type = unassigned DNA
tttcatataaggtcacagatcttgtgacaa

SEQ ID NO: 1449 - DNA, 30 bp, Homo sapiens
  source 1..30: mol_type = unassigned DNA
tagcattttttcatataaggtcacagatct

SEQ ID NO: 1450 - DNA, 30 bp, Homo sapiens
  source 1..30: mol_type = unassigned DNA
atgaaaaaattctagcattttttcatataa

SEQ ID NO: 1451 - DNA, 30 bp, Homo sapiens
  source 1..30: mol_type = unassigned DNA
aatgaaaaaattctagcattttttcatata

SEQ ID NO: 1452 - DNA, 30 bp, Homo sapiens
  source 1..30: mol_type = unassigned DNA
taatgaaaaaattctagcattttttcatat

SEQ ID NO: 1453 - DNA, 30 bp, Homo sapiens
  source 1..30: mol_type = unassigned DNA
ttaatgaaaaaattctagcattttttcata

SEQ ID NO: 1454 - DNA, 30 bp, Homo sapiens
  source 1..30: mol_type = unassigned DNA
tttaatgaaaaaattctagcattttttcat

SEQ ID NO: 1455 - DNA, 30 bp, Homo sapiens
  source 1..30: mol_type = unassigned DNA
ttttttaatgaaaaaattctagcatttttt

SEQ ID NO: 1456 - DNA, 30 bp, Homo sapiens
  source 1..30: mol_type = unassigned DNA
cttttttaatgaaaaaattctagcattttt

SEQ ID NO: 1457 - DNA, 30 bp, Homo sapiens
  source 1..30: mol_type = unassigned DNA
tcttttttaatgaaaaaattctagcatttt

SEQ ID NO: 1458 - DNA, 30 bp, Homo sapiens
  source 1..30: mol_type = unassigned DNA
agtattttcttttttaatgaaaaaattcta

SEQ ID NO: 1459 - DNA, 30 bp, Homo sapiens
  source 1..30: mol_type = unassigned DNA
tgaaaacatctgggtcactggctagttcag

SEQ ID NO: 1460 - DNA, 30 bp, Homo sapiens
  source 1..30: mol_type = unassigned DNA
ttcagcctcctgtgagcaatgagctaccaa

SEQ ID NO: 1461 - DNA, 30 bp, Homo sapiens
  source 1..30: mol_type = unassigned DNA
tcagcctcctgtgagcaatgagctaccaag

SEQ ID NO: 1462 - DNA, 30 bp, Homo sapiens
  source 1..30: mol_type = unassigned DNA
cagcctcctgtgagcaatgagctaccaagg

SEQ ID NO: 1463 - DNA, 30 bp, Homo sapiens
  source 1..30: mol_type = unassigned DNA
agcctcctgtgagcaatgagctaccaaggt

SEQ ID NO: 1464 - DNA, 30 bp, Homo sapiens
  source 1..30: mol_type = unassigned DNA
attatatgaatcagccttatggcactctga

SEQ ID NO: 1465 - DNA, 30 bp, Homo sapiens
  source 1..30: mol_type = unassigned DNA
tattatatgaatcagccttatggcactctg

SEQ ID NO: 1466 - DNA, 30 bp, Homo sapiens
  source 1..30: mol_type = unassigned DNA
tagggaagaaaactattttattatatgaat

SEQ ID NO: 1467 - DNA, 30 bp, Homo sapiens
  source 1..30: mol_type = unassigned DNA
aattatagggaagaaaactattttattata

SEQ ID NO: 1468 - DNA, 30 bp, Homo sapiens
  source 1..30: mol_type = unassigned DNA
atcttaaattatagggaagaaaactatttt

SEQ ID NO: 1469 - DNA, 30 bp, Homo sapiens
  source 1..30: mol_type = unassigned DNA
gatcttaaattatagggaagaaaactattt

SEQ ID NO: 1470 - DNA, 30 bp, Homo sapiens
  source 1..30: mol_type = unassigned DNA
acagaactaagtaactatttgatcttaaat

SEQ ID NO: 1471 - DNA, 30 bp, Homo sapiens
  source 1..30: mol_type = unassigned DNA
atagctactgctaggtattcacagaactaa

SEQ ID NO: 1472 - DNA, 30 bp, Homo sapiens
  source 1..30: mol_type = unassigned DNA
gatagctactgctaggtattcacagaacta

SEQ ID NO: 1473 - DNA, 30 bp, Homo sapiens
  source 1..30: mol_type = unassigned DNA
tgtttgatagctactgctaggtattcacag

SEQ ID NO: 1474 - DNA, 30 bp, Homo sapiens
  source 1..30: mol_type = unassigned DNA
aaattctgtttgatagctactgctaggtat

SEQ ID NO: 1475 - DNA, 30 bp, Homo sapiens
  source 1..30: mol_type = unassigned DNA
aaaattctgtttgatagctactgctaggta

SEQ ID NO: 1476 - DNA, 30 bp, Homo sapiens
  source 1..30: mol_type = unassigned DNA
actttaaaattctgtttgatagctactgct

SEQ ID NO: 1477 - DNA, 30 bp, Homo sapiens
  source 1..30: mol_type = unassigned DNA
tatgaatcagccttatggcactctgaaagg

SEQ ID NO: 1478 - DNA, 30 bp, Homo sapiens
  source 1..30: mol_type = unassigned DNA
aactttaaaattctgtttgatagctactgc

SEQ ID NO: 1479 - DNA, 30 bp, Homo sapiens
  source 1..30: mol_type = unassigned DNA
gttgtacagatttaactttaaaattctgtt

SEQ ID NO: 1480 - DNA, 30 bp, Homo sapiens
  source 1..30: mol_type = unassigned DNA
ttagttgtacagatttaactttaaaattct

SEQ ID NO: 1481 - DNA, 30 bp, Homo sapiens
  source 1..30: mol_type = unassigned DNA
attgttagttgtacagatttaactttaaaa

SEQ ID NO: 1482 - DNA, 30 bp, Homo sapiens
  source 1..30: mol_type = unassigned DNA
atcctccacttcattgttagttgtacagat

SEQ ID NO: 1483 - DNA, 30 bp, Homo sapiens
  source 1..30: mol_type = unassigned DNA
aatatgtatcgattcatcctccacttcatt

SEQ ID NO: 1484 - DNA, 30 bp, Homo sapiens
  source 1..30: mol_type = unassigned DNA
cattcaatatgtatcgattcatcctccact

SEQ ID NO: 1485 - DNA, 30 bp, Homo sapiens
  source 1..30: mol_type = unassigned DNA
tcaatgacaaagtcttccattcaatatgta

SEQ ID NO: 1486 - DNA, 30 bp, Homo sapiens
  source 1..30: mol_type = unassigned DNA
atcaatgacaaagtcttccattcaatatgt

SEQ ID NO: 1487 - DNA, 30 bp, Homo sapiens
  source 1..30: mol_type = unassigned DNA
ctaaagatggcctgaatttatcaatgacaa

SEQ ID NO: 1488 - DNA, 30 bp, Homo sapiens
  source 1..30: mol_type = unassigned DNA
cctaaagatggcctgaatttatcaatgaca

SEQ ID NO: 1489 - DNA, 30 bp, Homo sapiens
  source 1..30: mol_type = unassigned DNA
tcctaaagatggcctgaatttatcaatgac

SEQ ID NO: 1490 - DNA, 30 bp, Homo sapiens
  source 1..30: mol_type = unassigned DNA
ataaatccggaattttcctaaagatggcct

SEQ ID NO: 1491 - DNA, 30 bp, Homo sapiens
  source 1..30: mol_type = unassigned DNA
aagtaaaaaataatggtgattgataaatcc

SEQ ID NO: 1492 - DNA, 30 bp, Homo sapiens
  source 1..30: mol_type = unassigned DNA
tacagatttaactttaaaattctgtttgat

SEQ ID NO: 1493 - DNA, 30 bp, Homo sapiens
  source 1..30: mol_type = unassigned DNA
ctcacccttggtggatttagtcttttgcag

SEQ ID NO: 1494 - DNA, 30 bp, Homo sapiens
  source 1..30: mol_type = unassigned DNA
aatcgatgaagaagtaaacaatgattttct

SEQ ID NO: 1495 - DNA, 30 bp, Homo sapiens
  source 1..30: mol_type = unassigned DNA
tgaagcctgtgccaggtattatgagaacaa

SEQ ID NO: 1496 - DNA, 30 bp, Homo sapiens
  source 1..30: mol_type = unassigned DNA
cttagttctgtgaatacctagcagtagcta

SEQ ID NO: 1497 - DNA, 30 bp, Homo sapiens
  source 1..30: mol_type = unassigned DNA
agatcaaatagttacttagttctgtgaata

SEQ ID NO: 1498 - DNA, 30 bp, Homo sapiens
  source 1..30: mol_type = unassigned DNA
aagatcaaatagttacttagttctgtgaat

SEQ ID NO: 1499 - DNA, 30 bp, Homo sapiens
  source 1..30: mol_type = unassigned DNA
cctataatttaagatcaaatagttacttag

SEQ ID NO: 1500 - DNA, 30 bp, Homo sapiens
  source 1..30: mol_type = unassigned DNA
ttccctataatttaagatcaaatagttact

SEQ ID NO: 1501 - DNA, 30 bp, Homo sapiens
  source 1..30: mol_type = unassigned DNA
cttccctataatttaagatcaaatagttac

SEQ ID NO: 1502 - DNA, 30 bp, Homo sapiens
  source 1..30: mol_type = unassigned DNA
tcttccctataatttaagatcaaatagtta

SEQ ID NO: 1503 - DNA, 30 bp, Homo sapiens
  source 1..30: mol_type = unassigned DNA
atataataaaatagttttcttccctataat

SEQ ID NO: 1504 - DNA, 30 bp, Homo sapiens
  source 1..30: mol_type = unassigned DNA
agagtgccataaggctgattcatataataa

SEQ ID NO: 1505 - DNA, 30 bp, Homo sapiens
  source 1..30: mol_type = unassigned DNA
cagagtgccataaggctgattcatataata

SEQ ID NO: 1506 - DNA, 30 bp, Homo sapiens
  source 1..30: mol_type = unassigned DNA
aggaaatgtcctttcagagtgccataaggc

SEQ ID NO: 1507 - DNA, 30 bp, Homo sapiens
  source 1..30: mol_type = unassigned DNA
ctcagattcaggaaatgtcctttcagagtg

SEQ ID NO: 1508 - DNA, 30 bp, Homo sapiens
  source 1..30: mol_type = unassigned DNA
actcagattcaggaaatgtcctttcagagt

SEQ ID NO: 1509 - DNA, 30 bp, Homo sapiens
  source 1..30: mol_type = unassigned DNA
aaaaatgctacaagaggctacaatttactc

SEQ ID NO: 1510 - DNA, 30 bp, Homo sapiens
  source 1..30: mol_type = unassigned DNA
tcagtgattaaaaaatgctacaagaggcta

SEQ ID NO: 1511 - DNA, 30 bp, Homo sapiens
  source 1..30: mol_type = unassigned DNA
catcaaatagctcattctcagtgattaaaa

SEQ ID NO: 1512 - DNA, 30 bp, Homo sapiens
  source 1..30: mol_type = unassigned DNA
gcacaatatgacttccatcaaatagctcat

SEQ ID NO: 1513 - DNA, 30 bp, Homo sapiens
  source 1..30: mol_type = unassigned DNA
ggcacaatatgacttccatcaaatagctca

SEQ ID NO: 1514 - DNA, 30 bp, Homo sapiens
  source 1..30: mol_type = unassigned DNA
atcatttggcacaatatgacttccatcaaa

SEQ ID NO: 1515 - DNA, 30 bp, Homo sapiens
  source 1..30: mol_type = unassigned DNA
aatcatttggcacaatatgacttccatcaa

SEQ ID NO: 1516 - DNA, 30 bp, Homo sapiens
  source 1..30: mol_type = unassigned DNA
ctaatggatagatggtggaataagcattta

SEQ ID NO: 1517 - DNA, 30 bp, Homo sapiens
  source 1..30: mol_type = unassigned DNA
aaattactaatggatagatggtggaataag

SEQ ID NO: 1518 - DNA, 30 bp, Homo sapiens
  source 1..30: mol_type = unassigned DNA
caaattactaatggatagatggtggaataa

SEQ ID NO: 1519 - DNA, 30 bp, Homo sapiens
  source 1..30: mol_type = unassigned DNA
tcaaattactaatggatagatggtggaata

SEQ ID NO: 1520 - DNA, 30 bp, Homo sapiens
  source 1..30: mol_type = unassigned DNA
ttcaaattactaatggatagatggtggaat

SEQ ID NO: 1521 - DNA, 30 bp, Homo sapiens
  source 1..30: mol_type = unassigned DNA
tttttcaaattactaatggatagatggtgg

SEQ ID NO: 1522 - DNA, 30 bp, Homo sapiens
  source 1..30: mol_type = unassigned DNA
atttttcaaattactaatggatagatggtg

SEQ ID NO: 1523 - DNA, 30 bp, Homo sapiens
  source 1..30: mol_type = unassigned DNA
gttctgtgaatacctagcagtagctatcaa

SEQ ID NO: 1524 - DNA, 30 bp, Homo sapiens
  source 1..30: mol_type = unassigned DNA
tatttttcaaattactaatggatagatggt

SEQ ID NO: 1525 - DNA, 30 bp, Homo sapiens
  source 1..30: mol_type = unassigned DNA
tgtgaatacctagcagtagctatcaaacag

SEQ ID NO: 1526 - DNA, 30 bp, Homo sapiens
  source 1..30: mol_type = unassigned DNA
aaagttaaatctgtacaactaacaatgaag

SEQ ID NO: 1527 - DNA, 30 bp, Homo sapiens
  source 1..30: mol_type = unassigned DNA
ggtcgtgggaagaaaaacacatattatcct

SEQ ID NO: 1528 - DNA, 30 bp, Homo sapiens
  source 1..30: mol_type = unassigned DNA
tggtcgtgggaagaaaaacacatattatcc

SEQ ID NO: 1529 - DNA, 30 bp, Homo sapiens
  source 1..30: mol_type = unassigned DNA
ttggtcgtgggaagaaaaacacatattatc

SEQ ID NO: 1530 - DNA, 30 bp, Homo sapiens
  source 1..30: mol_type = unassigned DNA
tttggtcgtgggaagaaaaacacatattat

SEQ ID NO: 1531 - DNA, 30 bp, Homo sapiens
  source 1..30: mol_type = unassigned DNA
ttttttggtcgtgggaagaaaaacacatat

SEQ ID NO: 1532 - DNA, 30 bp, Homo sapiens
  source 1..30: mol_type = unassigned DNA
cttttttggtcgtgggaagaaaaacacata

SEQ ID NO: 1533 - DNA, 30 bp, Homo sapiens
  source 1..30: mol_type = unassigned DNA
ctcacaggaggctgaaaaaagctggcctcc

SEQ ID NO: 1534 - DNA, 30 bp, Homo sapiens
  source 1..30: mol_type = unassigned DNA
gtagctcattgctcacaggaggctgaaaaa

SEQ ID NO: 1535 - DNA, 30 bp, Homo sapiens
  source 1..30: mol_type = unassigned DNA
aactgagtgtgactgatcacatgctcaggc

SEQ ID NO: 1536 - DNA, 30 bp, Homo sapiens
  source 1..30: mol_type = unassigned DNA
cttcaactgagtgtgactgatcacatgctc

SEQ ID NO: 1537 - DNA, 30 bp, Homo sapiens
  source 1..30: mol_type = unassigned DNA
acttcaactgagtgtgactgatcacatgct

SEQ ID NO: 1538 - DNA, 30 bp, Homo sapiens
  source 1..30: mol_type = unassigned DNA
tacttcaactgagtgtgactgatcacatgc

SEQ ID NO: 1539 - DNA, 30 bp, Homo sapiens
  source 1..30: mol_type = unassigned DNA
ttacttcaactgagtgtgactgatcacatg

SEQ ID NO: 1540 - DNA, 30 bp, Homo sapiens
  source 1..30: mol_type = unassigned DNA
tttacttcaactgagtgtgactgatcacat

SEQ ID NO: 1541 - DNA, 30 bp, Homo sapiens
  source 1..30: mol_type = unassigned DNA
ttttttacttcaactgagtgtgactgatca

SEQ ID NO: 1542 - DNA, 30 bp, Homo sapiens
  source 1..30: mol_type = unassigned DNA
tcaatcaccattattttttacttcaactga

SEQ ID NO: 1543 - DNA, 30 bp, Homo sapiens
  source 1..30: mol_type = unassigned DNA
atcaatcaccattattttttacttcaactg

SEQ ID NO: 1544 - DNA, 30 bp, Homo sapiens
  source 1..30: mol_type = unassigned DNA
cggatttatcaatcaccattattttttact

SEQ ID NO: 1545 - DNA, 30 bp, Homo sapiens
  source 1..30: mol_type = unassigned DNA
ggaaaattccggatttatcaatcaccatta

SEQ ID NO: 1546 - DNA, 30 bp, Homo sapiens
  source 1..30: mol_type = unassigned DNA
aggaaaattccggatttatcaatcaccatt

SEQ ID NO: 1547 - DNA, 30 bp, Homo sapiens
  source 1..30: mol_type = unassigned DNA
aggccatctttaggaaaattccggatttat

SEQ ID NO: 1548 - DNA, 30 bp, Homo sapiens
  source 1..30: mol_type = unassigned DNA
ataaattcaggccatctttaggaaaattcc

SEQ ID NO: 1549 - DNA, 30 bp, Homo sapiens
  source 1..30: mol_type = unassigned DNA
tcattgataaattcaggccatctttaggaa

SEQ ID NO: 1550 - DNA, 30 bp, Homo sapiens
  source 1..30: mol_type = unassigned DNA
gtcattgataaattcaggccatctttagga

SEQ ID NO: 1551 - DNA, 30 bp, Homo sapiens
  source 1..30: mol_type = unassigned DNA
aatggaagactttgtcattgataaattcag

SEQ ID NO: 1552 - DNA, 30 bp, Homo sapiens
  source 1..30: mol_type = unassigned DNA
aatctgtacaactaacaatgaagtggagga

SEQ ID NO: 1553 - DNA, 30 bp, Homo sapiens
  source 1..30: mol_type = unassigned DNA
aagttaaatctgtacaactaacaatgaagt

SEQ ID NO: 1554 - DNA, 30 bp, Homo sapiens
  source 1..30: mol_type = unassigned DNA
taaagttaaatctgtacaactaacaatgaa

SEQ ID NO: 1555 - DNA, 30 bp, Homo sapiens
  source 1..30: mol_type = unassigned DNA
ttatttttcaaattactaatggatagatgg

SEQ ID NO: 1556 - DNA, 30 bp, Homo sapiens
  source 1..30: mol_type = unassigned DNA
ggtttttatttttcaaattactaatggata

SEQ ID NO: 1557 - DNA, 30 bp, Homo sapiens
  source 1..30: mol_type = unassigned DNA
gggtttttatttttcaaattactaatggat

SEQ ID NO: 1558 - DNA, 30 bp, Homo sapiens
  source 1..30: mol_type = unassigned DNA
ttacaataatgtgacttacagatttgtagt

SEQ ID NO: 1559 - DNA, 30 bp, Homo sapiens
  source 1..30: mol_type = unassigned DNA
tttacaataatgtgacttacagatttgtag

SEQ ID NO: 1560 - DNA, 30 bp, Homo sapiens
  source 1..30: mol_type = unassigned DNA
ttttacaataatgtgacttacagatttgta

SEQ ID NO: 1561 - DNA, 30 bp, Homo sapiens
  source 1..30: mol_type = unassigned DNA
tttttacaataatgtgacttacagatttgt

SEQ ID NO: 1562 - DNA, 30 bp, Homo sapiens
  source 1..30: mol_type = unassigned DNA
ttttttacaataatgtgacttacagatttg

SEQ ID NO: 1563 - DNA, 30 bp, Homo sapiens
  source 1..30: mol_type = unassigned DNA
acaatggtttttttttacaataatgtgact

SEQ ID NO: 1564 - DNA, 30 bp, Homo sapiens
  source 1..30: mol_type = unassigned DNA
gtcaaaattcacaatggtttttttttacaa

SEQ ID NO: 1565 - DNA, 30 bp, Homo sapiens
  source 1..30: mol_type = unassigned DNA
agtcaaaattcacaatggtttttttttaca

SEQ ID NO: 1566 - DNA, 30 bp, Homo sapiens
  source 1..30: mol_type = unassigned DNA
aaatctacaactttagtcaaaattcacaat

SEQ ID NO: 1567 - DNA, 30 bp, Homo sapiens
  source 1..30: mol_type = unassigned DNA
tgctattaaaatctacaactttagtcaaaa

SEQ ID NO: 1568 - DNA, 30 bp, Homo sapiens
  source 1..30: mol_type = unassigned DNA
gtgctattaaaatctacaactttagtcaaa

SEQ ID NO: 1569 - DNA, 30 bp, Homo sapiens
  source 1..30: mol_type = unassigned DNA
gacatttgtgctattaaaatctacaacttt

SEQ ID NO: 1570 - DNA, 30 bp, Homo sapiens
  source 1..30: mol_type = unassigned DNA
agattggacatttgtgctattaaaatctac

SEQ ID NO: 1571 - DNA, 30 bp, Homo sapiens
  source 1..30: mol_type = unassigned DNA
aaatgataattaagattggacatttgtgct

SEQ ID NO: 1572 - DNA, 30 bp, Homo sapiens
  source 1..30: mol_type = unassigned DNA
aaaatgataattaagattggacatttgtgc

SEQ ID NO: 1573 - DNA, 30 bp, Homo sapiens
  source 1..30: mol_type = unassigned DNA
taaaatgataattaagattggacatttgtg

SEQ ID NO: 1574 - DNA, 30 bp, Homo sapiens
  source 1..30: mol_type = unassigned DNA
tctgagagaaagtatattttaaaatgataa

SEQ ID NO: 1575 - DNA, 30 bp, Homo sapiens
  source 1..30: mol_type = unassigned DNA
aaattctctgagagaaagtatattttaaaa

SEQ ID NO: 1576 - DNA, 30 bp, Homo sapiens
  source 1..30: mol_type = unassigned DNA
tctatgcacgttaaaattctctgagagaaa

SEQ ID NO: 1577 - DNA, 30 bp, Homo sapiens
  source 1..30: mol_type = unassigned DNA
gtctatgcacgttaaaattctctgagagaa

SEQ ID NO: 1578 - DNA, 30 bp, Homo sapiens
  source 1..30: mol_type = unassigned DNA
tggtgtttgtctatgcacgttaaaattctc

SEQ ID NO: 1579 - DNA, 30 bp, Homo sapiens
  source 1..30: mol_type = unassigned DNA
atagaccttgtggtgtttgtctatgcacgt

SEQ ID NO: 1580 - DNA, 30 bp, Homo sapiens
  source 1..30: mol_type = unassigned DNA
taccaggtgagtaagctgagcctgcaataa

SEQ ID NO: 1581 - DNA, 30 bp, Homo sapiens
  source 1..30: mol_type = unassigned DNA
ataccaggtgagtaagctgagcctgcaata

SEQ ID NO: 1582 - DNA, 30 bp, Homo sapiens
  source 1..30: mol_type = unassigned DNA
gtttataccaggtgagtaagctgagcctgc

SEQ ID NO: 1583 - DNA, 30 bp, Homo sapiens
  source 1..30: mol_type = unassigned DNA
agtttataccaggtgagtaagctgagcctg

SEQ ID NO: 1584 - DNA, 30 bp, Homo sapiens
  source 1..30: mol_type = unassigned DNA
atctcatgtatttagtttataccaggtgag

SEQ ID NO: 1585 - DNA, 30 bp, Homo sapiens
  source 1..30: mol_type = unassigned DNA
tacaataatgtgacttacagatttgtagta

SEQ ID NO: 1586 - DNA, 30 bp, Homo sapiens
  source 1..30: mol_type = unassigned DNA
acaataatgtgacttacagatttgtagtaa

SEQ ID NO: 1587 - DNA, 30 bp, Homo sapiens
  source 1..30: mol_type = unassigned DNA
caataatgtgacttacagatttgtagtaaa

SEQ ID NO: 1588 - DNA, 30 bp, Homo sapiens
  source 1..30: mol_type = unassigned DNA
cagatttgtagtaaattattctattctaaa

SEQ ID NO: 1589 - DNA, 30 bp, Homo sapiens
  source 1..30: mol_type = unassigned DNA
ctttgggtttttatttttcaaattactaat

SEQ ID NO: 1590 - DNA, 30 bp, Homo sapiens
  source 1..30: mol_type = unassigned DNA
attactttgggtttttatttttcaaattac

SEQ ID NO: 1591 - DNA, 30 bp, Homo sapiens
  source 1..30: mol_type = unassigned DNA
aattactttgggtttttatttttcaaatta

SEQ ID NO: 1592 - DNA, 30 bp, Homo sapiens
  source 1..30: mol_type = unassigned DNA
taattactttgggtttttatttttcaaatt

SEQ ID NO: 1593 - DNA, 30 bp, Homo sapiens
  source 1..30: mol_type = unassigned DNA
aaagcagttttaattactttgggtttttat

SEQ ID NO: 1594 - DNA, 30 bp, Homo sapiens
  source 1..30: mol_type = unassigned DNA
cattgaaagcagttttaattactttgggtt

SEQ ID NO: 1595 - DNA, 30 bp, Homo sapiens
  source 1..30: mol_type = unassigned DNA
ttgcattgaaagcagttttaattactttgg

SEQ ID NO: 1596 - DNA, 30 bp, Homo sapiens
  source 1..30: mol_type = unassigned DNA
gttgcattgaaagcagttttaattactttg

SEQ ID NO: 1597 - DNA, 30 bp, Homo sapiens
  source 1..30: mol_type = unassigned DNA
tttgttgcattgaaagcagttttaattact

SEQ ID NO: 1598 - DNA, 30 bp, Homo sapiens
  source 1..30: mol_type = unassigned DNA
atttgttgcattgaaagcagttttaattac

SEQ ID NO: 1599 - DNA, 30 bp, Homo sapiens
  source 1..30: mol_type = unassigned DNA
tatttgttgcattgaaagcagttttaatta

SEQ ID NO: 1600 - DNA, 30 bp, Homo sapiens
  source 1..30: mol_type = unassigned DNA
gcaaacttttatttgttgcattgaaagcag

SEQ ID NO: 1601 - DNA, 30 bp, Homo sapiens
  source 1..30: mol_type = unassigned DNA
agcaaacttttatttgttgcattgaaagca

SEQ ID NO: 1602 - DNA, 30 bp, Homo sapiens
  source 1..30: mol_type = unassigned DNA
gtcgtgggaagaaaaacacatattatcctg

SEQ ID NO: 1603 - DNA, 30 bp, Homo sapiens
  source 1..30: mol_type = unassigned DNA
tagcaaacttttatttgttgcattgaaagc

SEQ ID NO: 1604 - DNA, 30 bp, Homo sapiens
  source 1..30: mol_type = unassigned DNA
atatttttagcaaacttttatttgttgcat

SEQ ID NO: 1605 - DNA, 30 bp, Homo sapiens
  source 1..30: mol_type = unassigned DNA
cctcattaatatttttagcaaacttttatt

SEQ ID NO: 1606 - DNA, 30 bp, Homo sapiens
  source 1..30: mol_type = unassigned DNA
cagctattacctcattaatatttttagcaa

SEQ ID NO: 1607 - DNA, 30 bp, Homo sapiens
  source 1..30: mol_type = unassigned DNA
ttacagctattacctcattaatatttttag

SEQ ID NO: 1608 - DNA, 30 bp, Homo sapiens
  source 1..30: mol_type = unassigned DNA
ttgttacagctattacctcattaatatttt

SEQ ID NO: 1609 - DNA, 30 bp, Homo sapiens
  source 1..30: mol_type = unassigned DNA
attgttacagctattacctcattaatattt

SEQ ID NO: 1610 - DNA, 30 bp, Homo sapiens
  source 1..30: mol_type = unassigned DNA
tattgttacagctattacctcattaatatt

SEQ ID NO: 1611 - DNA, 30 bp, Homo sapiens
  source 1..30: mol_type = unassigned DNA
ttattgttacagctattacctcattaatat

SEQ ID NO: 1612 - DNA, 30 bp, Homo sapiens
  source 1..30: mol_type = unassigned DNA
taaaagagaaatgagtgtttttattgttac

SEQ ID NO: 1613 - DNA, 30 bp, Homo sapiens
  source 1..30: mol_type = unassigned DNA
tattctaaaagagaaatgagtgtttttatt

SEQ ID NO: 1614 - DNA, 30 bp, Homo sapiens
  source 1..30: mol_type = unassigned DNA
ttctattctaaaagagaaatgagtgttttt

SEQ ID NO: 1615 - DNA, 30 bp, Homo sapiens
  source 1..30: mol_type = unassigned DNA
tagtaaattattctattctaaaagagaaat

SEQ ID NO: 1616 - DNA, 30 bp, Homo sapiens
  source 1..30: mol_type = unassigned DNA
gtagtaaattattctattctaaaagagaaa

SEQ ID NO: 1617 - DNA, 30 bp, Homo sapiens
  source 1..30: mol_type = unassigned DNA
ttagcaaacttttatttgttgcattgaaag

SEQ ID NO: 1618 - DNA, 30 bp, Homo sapiens
  source 1..30: mol_type = unassigned DNA
tcctgttgtcacaagatctgtgaccttata

SEQ ID NO: 1619 - DNA, 30 bp, Homo sapiens
  source 1..30: mol_type = unassigned DNA
tcacaagatctgtgaccttatatgaaaaaa

SEQ ID NO: 1620 - DNA, 30 bp, Homo sapiens
  source 1..30: mol_type = unassigned DNA
tatgaaaaaatgctagaattttttcattaa

SEQ ID NO: 1621 - DNA, 30 bp, Homo sapiens
  source 1..30: mol_type = unassigned DNA
aaatctaatccaatgtgatttcaatctagt

SEQ ID NO: 1622 - DNA, 30 bp, Homo sapiens
  source 1..30: mol_type = unassigned DNA
taaatctaatccaatgtgatttcaatctag

SEQ ID NO: 1623 - DNA, 30 bp, Homo sapiens
  source 1..30: mol_type = unassigned DNA
ttaaatctaatccaatgtgatttcaatcta

SEQ ID NO: 1624 - DNA, 30 bp, Homo sapiens
  source 1..30: mol_type = unassigned DNA
aagatacctttttaaatctaatccaatgtg

SEQ ID NO: 1625 - DNA, 30 bp, Homo sapiens
  source 1..30: mol_type = unassigned DNA
aaagatacctttttaaatctaatccaatgt

SEQ ID NO: 1626 - DNA, 30 bp, Homo sapiens
  source 1..30: mol_type = unassigned DNA
catttaaagatacctttttaaatctaatcc

SEQ ID NO: 1627 - DNA, 30 bp, Homo sapiens
  source 1..30: mol_type = unassigned DNA
ccatttaaagatacctttttaaatctaatc

SEQ ID NO: 1628 - DNA, 30 bp, Homo sapiens
  source 1..30: mol_type = unassigned DNA
tccatttaaagatacctttttaaatctaat

SEQ ID NO: 1629 - DNA, 30 bp, Homo sapiens
  source 1..30: mol_type = unassigned DNA
ttttccatttaaagatacctttttaaatct

SEQ ID NO: 1630 - DNA, 30 bp, Homo sapiens
  source 1..30: mol_type = unassigned DNA
cttttccatttaaagatacctttttaaatc

SEQ ID NO: 1631 - DNA, 30 bp, Homo sapiens
  source 1..30: mol_type = unassigned DNA
taagtctgtctttcttttccatttaaagat

SEQ ID NO: 1632 - DNA, 30 bp, Homo sapiens
  source 1..30: mol_type = unassigned DNA
ccatcttctaagtctgtctttcttttccat

SEQ ID NO: 1633 - DNA, 30 bp, Homo sapiens
  source 1..30: mol_type = unassigned DNA
cccatcttctaagtctgtctttcttttcca

SEQ ID NO: 1634 - DNA, 30 bp, Homo sapiens
  source 1..30: mol_type = unassigned DNA
tcccatcttctaagtctgtctttcttttcc

SEQ ID NO: 1635 - DNA, 30 bp, Homo sapiens
  source 1..30: mol_type = unassigned DNA
ttcccatcttctaagtctgtctttcttttc

SEQ ID NO: 1636 - DNA, 30 bp, Homo sapiens
  source 1..30: mol_type = unassigned DNA
tttttcccatcttctaagtctgtctttctt

SEQ ID NO: 1637 - DNA, 30 bp, Homo sapiens
  source 1..30: mol_type = unassigned DNA
gcgagtaaaacaggcaggtatgtgatactg

SEQ ID NO: 1638 - DNA, 30 bp, Homo sapiens
  source 1..30: mol_type = unassigned DNA
agagcacatctgaatatcagagtctccacc

SEQ ID NO: 1639 - DNA, 30 bp, Homo sapiens
  source 1..30: mol_type = unassigned DNA
aaatgtgccccctgttcagagcacatctga

SEQ ID NO: 1640 - DNA, 30 bp, Homo sapiens
  source 1..30: mol_type = unassigned DNA
atcgattgaaatgtgccccctgttcagagc

SEQ ID NO: 1641 - DNA, 30 bp, Homo sapiens
  source 1..30: mol_type = unassigned DNA
ttcatcgattgaaatgtgccccctgttcag

SEQ ID NO: 1642 - DNA, 30 bp, Homo sapiens
  source 1..30: mol_type = unassigned DNA
cttcttcatcgattgaaatgtgccccctgt

SEQ ID NO: 1643 - DNA, 30 bp, Homo sapiens
  source 1..30: mol_type = unassigned DNA
acttcttcatcgattgaaatgtgccccctg

SEQ ID NO: 1644 - DNA, 30 bp, Homo sapiens
  source 1..30: mol_type = unassigned DNA
tttacttcttcatcgattgaaatgtgcccc

SEQ ID NO: 1645 - DNA, 30 bp, Homo sapiens
  source 1..30: mol_type = unassigned DNA
aagaaaatcattgtttacttcttcatcgat

SEQ ID NO: 1646 - DNA, 30 bp, Homo sapiens
  source 1..30: mol_type = unassigned DNA
aaaataaaggaataaattaaagaaaatcat

SEQ ID NO: 1647 - DNA, 30 bp, Homo sapiens
  source 1..30: mol_type = unassigned DNA
atgcttaaaaataaaggaataaattaaaga

SEQ ID NO: 1648 - DNA, 30 bp, Homo sapiens
  source 1..30: mol_type = unassigned DNA
aatctaatccaatgtgatttcaatctagtt

SEQ ID NO: 1649 - DNA, 30 bp, Homo sapiens
  source 1..30: mol_type = unassigned DNA
caatctagttttatcagatttcaacaatta

SEQ ID NO: 1650 - DNA, 30 bp, Homo sapiens
  source 1..30: mol_type = unassigned DNA
aatctagttttatcagatttcaacaattat

SEQ ID NO: 1651 - DNA, 30 bp, Homo sapiens
  source 1..30: mol_type = unassigned DNA
tatcagatttcaacaattattgagcatctc

SEQ ID NO: 1652 - DNA, 30 bp, Homo sapiens
  source 1..30: mol_type = unassigned DNA
tttgattacattttatgtaattctaatcca

SEQ ID NO: 1653 - DNA, 30 bp, Homo sapiens
  source 1..30: mol_type = unassigned DNA
ttttttgattacattttatgtaattctaat

SEQ ID NO: 1654 - DNA, 30 bp, Homo sapiens
  source 1..30: mol_type = unassigned DNA
atagaattattttttgattacattttatgt

SEQ ID NO: 1655 - DNA, 30 bp, Homo sapiens
  source 1..30: mol_type = unassigned DNA
aatatgcattgatagaattattttttgatt

SEQ ID NO: 1656 - DNA, 30 bp, Homo sapiens
  source 1..30: mol_type = unassigned DNA
aaatatgcattgatagaattattttttgat

SEQ ID NO: 1657 - DNA, 30 bp, Homo sapiens
  source 1..30: mol_type = unassigned DNA
taaatatgcattgatagaattattttttga

SEQ ID NO: 1658 - DNA, 30 bp, Homo sapiens
  source 1..30: mol_type = unassigned DNA
ttaaatatgcattgatagaattattttttg

SEQ ID NO: 1659 - DNA, 30 bp, Homo sapiens
  source 1..30: mol_type = unassigned DNA
tttaaatatgcattgatagaattatttttt

SEQ ID NO: 1660 - DNA, 30 bp, Homo sapiens
  source 1..30: mol_type = unassigned DNA
ggtatcatcaaaagtggattttttaaatat

SEQ ID NO: 1661 - DNA, 30 bp, Homo sapiens
  source 1..30: mol_type = unassigned DNA
gggtatcatcaaaagtggattttttaaata

SEQ ID NO: 1662 - DNA, 30 bp, Homo sapiens
  source 1..30: mol_type = unassigned DNA
tgggtatcatcaaaagtggattttttaaat

SEQ ID NO: 1663 - DNA, 30 bp, Homo sapiens
  source 1..30: mol_type = unassigned DNA
acgaagtaagaagaaatatataagtataaa

SEQ ID NO: 1664 - DNA, 30 bp, Homo sapiens
  source 1..30: mol_type = unassigned DNA
aacgaagtaagaagaaatatataagtataa

SEQ ID NO: 1665 - DNA, 30 bp, Homo sapiens
  source 1..30: mol_type = unassigned DNA
aatgcttaaaaataaaggaataaattaaag

SEQ ID NO: 1666 - DNA, 30 bp, Homo sapiens
  source 1..30: mol_type = unassigned DNA
taacgaagtaagaagaaatatataagtata

SEQ ID NO: 1667 - DNA, 30 bp, Homo sapiens
  source 1..30: mol_type = unassigned DNA
gaaaatcgatgttaattttaacgaagtaag

SEQ ID NO: 1668 - DNA, 30 bp, Homo sapiens
  source 1..30: mol_type = unassigned DNA
ttagaaaatcgatgttaattttaacgaagt

SEQ ID NO: 1669 - DNA, 30 bp, Homo sapiens
  source 1..30: mol_type = unassigned DNA
attagaaaatcgatgttaattttaacgaag

SEQ ID NO: 1670 - DNA, 30 bp, Homo sapiens
  source 1..30: mol_type = unassigned DNA
tgtttattagaaaatcgatgttaattttaa

SEQ ID NO: 1671 - DNA, 30 bp, Homo sapiens
  source 1..30: mol_type = unassigned DNA
ctgtttattagaaaatcgatgttaatttta

SEQ ID NO: 1672 - DNA, 30 bp, Homo sapiens
  source 1..30: mol_type = unassigned DNA
tctgtttattagaaaatcgatgttaatttt

SEQ ID NO: 1673 - DNA, 30 bp, Homo sapiens
  source 1..30: mol_type = unassigned DNA
tagtggttttctgtttattagaaaatcgat

SEQ ID NO: 1674 - DNA, 30 bp, Homo sapiens
  source 1..30: mol_type = unassigned DNA
agcatctccttgtagtggttttctgtttat

SEQ ID NO: 1675 - DNA, 30 bp, Homo sapiens
  source 1..30: mol_type = unassigned DNA
ttgagcatctccttgtagtggttttctgtt

SEQ ID NO: 1676 - DNA, 30 bp, Homo sapiens
  source 1..30: mol_type = unassigned DNA
aacaattattgagcatctccttgtagtggt

SEQ ID NO: 1677 - DNA, 30 bp, Homo sapiens
  source 1..30: mol_type = unassigned DNA
caacaattattgagcatctccttgtagtgg

SEQ ID NO: 1678 - DNA, 30 bp, Homo sapiens
  source 1..30: mol_type = unassigned DNA
tcagatttcaacaattattgagcatctcct

SEQ ID NO: 1679 - DNA, 30 bp, Homo sapiens
  source 1..30: mol_type = unassigned DNA
atcagatttcaacaattattgagcatctcc

SEQ ID NO: 1680 - DNA, 30 bp, Homo sapiens
  source 1..30: mol_type = unassigned DNA
attttaacgaagtaagaagaaatatataag

SEQ ID NO: 1681 - DNA, 30 bp, Homo sapiens
  source 1..30: mol_type = unassigned DNA
tcaattaatctcatgtatttagtttatacc

SEQ ID NO: 1682 - DNA, 30 bp, Homo sapiens
  source 1..30: mol_type = unassigned DNA
taatgcttaaaaataaaggaataaattaaa

SEQ ID NO: 1683 - DNA, 30 bp, Homo sapiens
  source 1..30: mol_type = unassigned DNA
agcagccgaatattttaatgcttaaaaata

SEQ ID NO: 1684 - DNA, 30 bp, Homo sapiens
  source 1..30: mol_type = unassigned DNA
ccaggaacattcaagtgtttattcaataag

SEQ ID NO: 1685 - DNA, 30 bp, Homo sapiens
  source 1..30: mol_type = unassigned DNA
accaggaacattcaagtgtttattcaataa

SEQ ID NO: 1686 - DNA, 30 bp, Homo sapiens
  source 1..30: mol_type = unassigned DNA
taccaggaacattcaagtgtttattcaata

SEQ ID NO: 1687 - DNA, 30 bp, Homo sapiens
  source 1..30: mol_type = unassigned DNA
ttttaccaggaacattcaagtgtttattca

SEQ ID NO: 1688 - DNA, 30 bp, Homo sapiens
  source 1..30: mol_type = unassigned DNA
cttttaccaggaacattcaagtgtttattc

SEQ ID NO: 1689 - DNA, 30 bp, Homo sapiens
  source 1..30: mol_type = unassigned DNA
tcttttaccaggaacattcaagtgtttatt

SEQ ID NO: 1690 - DNA, 30 bp, Homo sapiens
  source 1..30: mol_type = unassigned DNA
ataaaatcttttcttttaccaggaacattc

SEQ ID NO: 1691 - DNA, 30 bp, Homo sapiens
  source 1..30: mol_type = unassigned DNA
aataaaatcttttcttttaccaggaacatt

SEQ ID NO: 1692 - DNA, 30 bp, Homo sapiens
  source 1..30: mol_type = unassigned DNA
actgtttaataaaatcttttcttttaccag

SEQ ID NO: 1693 - DNA, 30 bp, Homo sapiens
  source 1..30: mol_type = unassigned DNA
caaatattaactgtttaataaaatcttttc

SEQ ID NO: 1694 - DNA, 30 bp, Homo sapiens
  source 1..30: mol_type = unassigned DNA
atgtaaacctagttccaaatattaactgtt

SEQ ID NO: 1695 - DNA, 30 bp, Homo sapiens
  source 1..30: mol_type = unassigned DNA
tctaaaaaagcagatgattgatgtaaacct

SEQ ID NO: 1696 - DNA, 30 bp, Homo sapiens
  source 1..30: mol_type = unassigned DNA
accacactagagggcaatcatgttctctaa

SEQ ID NO: 1697 - DNA, 30 bp, Homo sapiens
  source 1..30: mol_type = unassigned DNA
caccacactagagggcaatcatgttctcta

SEQ ID NO: 1698 - DNA, 30 bp, Homo sapiens
  source 1..30: mol_type = unassigned DNA
tcaccacactagagggcaatcatgttctct

SEQ ID NO: 1699 - DNA, 30 bp, Homo sapiens
  source 1..30: mol_type = unassigned DNA
acttttcaccacactagagggcaatcatgt

SEQ ID NO: 1700 - DNA, 30 bp, Homo sapiens
  source 1..30: mol_type = unassigned DNA
gaaaacctcggtgtctgcattaacttttca

SEQ ID NO: 1701 - DNA, 30 bp, Homo sapiens
  source 1..30: mol_type = unassigned DNA
tgtccattggaaaacctcggtgtctgcatt

SEQ ID NO: 1702 - DNA, 30 bp, Homo sapiens
  source 1..30: mol_type = unassigned DNA
agaacctagactggttctgtccattggaaa

SEQ ID NO: 1703 - DNA, 30 bp, Homo sapiens
  source 1..30: mol_type = unassigned DNA
cagaacctagactggttctgtccattggaa

SEQ ID NO: 1704 - DNA, 30 bp, Homo sapiens
  source 1..30: mol_type = unassigned DNA
tcagaacctagactggttctgtccattgga

SEQ ID NO: 1705 - DNA, 30 bp, Homo sapiens
  source 1..30: mol_type = unassigned DNA
aaaaagaaaatactgaactagccagtgacc

SEQ ID NO: 1706 - DNA, 30 bp, Homo sapiens
  source 1..30: mol_type = unassigned DNA
attaaaaaagaaaatactgaactagccagt

SEQ ID NO: 1707 - DNA, 30 bp, Homo sapiens
  source 1..30: mol_type = unassigned DNA
cattaaaaaagaaaatactgaactagccag

SEQ ID NO: 1708 - DNA, 30 bp, Homo sapiens
  source 1..30: mol_type = unassigned DNA
tcattaaaaaagaaaatactgaactagcca

SEQ ID NO: 1709 - DNA, 30 bp, Homo sapiens
  source 1..30: mol_type = unassigned DNA
ttcattaaaaaagaaaatactgaactagcc

SEQ ID NO: 1710 - DNA, 30 bp, Homo sapiens
  source 1..30: mol_type = unassigned DNA
tttcattaaaaaagaaaatactgaactagc

SEQ ID NO: 1711 - DNA, 30 bp, Homo sapiens
  source 1..30: mol_type = unassigned DNA
aagtgtttattcaataagctgatgccatgc

SEQ ID NO: 1712 - DNA, 30 bp, Homo sapiens
  source 1..30: mol_type = unassigned DNA
attcaataagctgatgccatgctttaccct

SEQ ID NO: 1713 - DNA, 30 bp, Homo sapiens
  source 1..30: mol_type = unassigned DNA
ttcaataagctgatgccatgctttacccta

SEQ ID NO: 1714 - DNA, 30 bp, Homo sapiens
  source 1..30: mol_type = unassigned DNA
aataagctgatgccatgctttaccctagtg

SEQ ID NO: 1715 - DNA, 30 bp, Homo sapiens
  source 1..30: mol_type = unassigned DNA
tttagcagccgaatattttaatgcttaaaa

SEQ ID NO: 1716 - DNA, 30 bp, Homo sapiens
  source 1..30: mol_type = unassigned DNA
tagtggataaatagtagaaaaatgtcagta

SEQ ID NO: 1717 - DNA, 30 bp, Homo sapiens
  source 1..30: mol_type = unassigned DNA
gtagtggataaatagtagaaaaatgtcagt

SEQ ID NO: 1718 - DNA, 30 bp, Homo sapiens
  source 1..30: mol_type = unassigned DNA
tgtagtggataaatagtagaaaaatgtcag

SEQ ID NO: 1719 - DNA, 30 bp, Homo sapiens
  source 1..30: mol_type = unassigned DNA
tgagattttgtagtggataaatagtagaaa

SEQ ID NO: 1720 - DNA, 30 bp, Homo sapiens
  source 1..30: mol_type = unassigned DNA
cttctgagattttgtagtggataaatagta

SEQ ID NO: 1721 - DNA, 30 bp, Homo sapiens
  source 1..30: mol_type = unassigned DNA
tgttacttctgagattttgtagtggataaa

SEQ ID NO: 1722 - DNA, 30 bp, Homo sapiens
  source 1..30: mol_type = unassigned DNA
atgttacttctgagattttgtagtggataa

SEQ ID NO: 1723 - DNA, 30 bp, Homo sapiens
  source 1..30: mol_type = unassigned DNA
taataccatttatgttacttctgagatttt

SEQ ID NO: 1724 - DNA, 30 bp, Homo sapiens
  source 1..30: mol_type = unassigned DNA
ttataataccatttatgttacttctgagat

SEQ ID NO: 1725 - DNA, 30 bp, Homo sapiens
  source 1..30: mol_type = unassigned DNA
ttattataataccatttatgttacttctga

SEQ ID NO: 1726 - DNA, 30 bp, Homo sapiens
  source 1..30: mol_type = unassigned DNA
cattgttattataataccatttatgttact

SEQ ID NO: 1727 - DNA, 30 bp, Homo sapiens
  source 1..30: mol_type = unassigned DNA
ttacattgttattataataccatttatgtt

SEQ ID NO: 1728 - DNA, 30 bp, Homo sapiens
  source 1..30: mol_type = unassigned DNA
gcagccgaatattttaatgcttaaaaataa

SEQ ID NO: 1729 - DNA, 30 bp, Homo sapiens
  source 1..30: mol_type = unassigned DNA
attacattgttattataataccatttatgt

SEQ ID NO: 1730 - DNA, 30 bp, Homo sapiens
  source 1..30: mol_type = unassigned DNA
tcagttttattacattgttattataatacc

SEQ ID NO: 1731 - DNA, 30 bp, Homo sapiens
  source 1..30: mol_type = unassigned DNA
cttctcagttttattacattgttattataa

SEQ ID NO: 1732 - DNA, 30 bp, Homo sapiens
  source 1..30: mol_type = unassigned DNA
acttctcagttttattacattgttattata

SEQ ID NO: 1733 - DNA, 30 bp, Homo sapiens
  source 1..30: mol_type = unassigned DNA
tacttctcagttttattacattgttattat

SEQ ID NO: 1734 - DNA, 30 bp, Homo sapiens
  source 1..30: mol_type = unassigned DNA
cctgatggttttacttctcagttttattac

SEQ ID NO: 1735 - DNA, 30 bp, Homo sapiens
  source 1..30: mol_type = unassigned DNA
ttccctgatggttttacttctcagttttat

SEQ ID NO: 1736 - DNA, 30 bp, Homo sapiens
  source 1..30: mol_type = unassigned DNA
attattccctgatggttttacttctcagtt

SEQ ID NO: 1737 - DNA, 30 bp, Homo sapiens
  source 1..30: mol_type = unassigned DNA
aaggagacaggatgaaatgagtggtcataa

SEQ ID NO: 1738 - DNA, 30 bp, Homo sapiens
  source 1..30: mol_type = unassigned DNA
caaggagacaggatgaaatgagtggtcata

SEQ ID NO: 1739 - DNA, 30 bp, Homo sapiens
  source 1..30: mol_type = unassigned DNA
tcaaggagacaggatgaaatgagtggtcat

SEQ ID NO: 1740 - DNA, 30 bp, Homo sapiens
  source 1..30: mol_type = unassigned DNA
tacaattttcaaggagacaggatgaaatga

SEQ ID NO: 1741 - DNA, 30 bp, Homo sapiens
  source 1..30: mol_type = unassigned DNA
ccctagtggatgaacagagcttgtacaatt

SEQ ID NO: 1742 - DNA, 30 bp, Homo sapiens
  source 1..30: mol_type = unassigned DNA
accctagtggatgaacagagcttgtacaat

SEQ ID NO: 1743 - DNA, 30 bp, Homo sapiens
  source 1..30: mol_type = unassigned DNA
tattacattgttattataataccatttatg

SEQ ID NO: 1744 - DNA, 30 bp, Homo sapiens
  source 1..30: mol_type = unassigned DNA
ttgattacattttatgtaattctaatccag

SEQ ID NO: 1745 - DNA, 30 bp, Homo sapiens
  source 1..30: mol_type = unassigned DNA
atcaattaatctcatgtatttagtttatac

SEQ ID NO: 1746 - DNA, 30 bp, Homo sapiens
  source 1..30: mol_type = unassigned DNA
caggataaaactgaaagaaatggcagtagt

SEQ ID NO: 1747 - DNA, 30 bp, Homo sapiens
  source 1..30: mol_type = unassigned DNA
gcgggaaaagcttctagaacctagacatgt

SEQ ID NO: 1748 - DNA, 30 bp, Homo sapiens
  source 1..30: mol_type = unassigned DNA
atcgtttgcgggaaaagcttctagaaccta

SEQ ID NO: 1749 - DNA, 30 bp, Homo sapiens
  source 1..30: mol_type = unassigned DNA
gatcgtttgcgggaaaagcttctagaacct

SEQ ID NO: 1750 - DNA, 30 bp, Homo sapiens
  source 1..30: mol_type = unassigned DNA
aagacctttgatcgtttgcgggaaaagctt

SEQ ID NO: 1751 - DNA, 30 bp, Homo sapiens
  source 1..30: mol_type = unassigned DNA
gaagacctttgatcgtttgcgggaaaagct

SEQ ID NO: 1752 - DNA, 30 bp, Homo sapiens
  source 1..30: mol_type = unassigned DNA
tttgaagacctttgatcgtttgcgggaaaa

SEQ ID NO: 1753 - DNA, 30 bp, Homo sapiens
  source 1..30: mol_type = unassigned DNA
gacatagacacagataaagggttctttgaa

SEQ ID NO: 1754 - DNA, 30 bp, Homo sapiens
  source 1..30: mol_type = unassigned DNA
agacatagacacagataaagggttctttga

SEQ ID NO: 1755 - DNA, 30 bp, Homo sapiens
  source 1..30: mol_type = unassigned DNA
catagagtgtttagacatagacacagataa

SEQ ID NO: 1756 - DNA, 30 bp, Homo sapiens
  source 1..30: mol_type = unassigned DNA
ggaagcaaattacatagagtgtttagacat

SEQ ID NO: 1757 - DNA, 30 bp, Homo sapiens
  source 1..30: mol_type = unassigned DNA
cggaagcaaattacatagagtgtttagaca

SEQ ID NO: 1758 - DNA, 30 bp, Homo sapiens
  source 1..30: mol_type = unassigned DNA
tcggaagcaaattacatagagtgtttagac

SEQ ID NO: 1759 - DNA, 30 bp, Homo sapiens
  source 1..30: mol_type = unassigned DNA
ttttcggaagcaaattacatagagtgttta

SEQ ID NO: 1760 - DNA, 30 bp, Homo sapiens
  source 1..30: mol_type = unassigned DNA
cttttcggaagcaaattacatagagtgttt

SEQ ID NO: 1761 - DNA, 30 bp, Homo sapiens
  source 1..30: mol_type = unassigned DNA
tcttttcggaagcaaattacatagagtgtt

SEQ ID NO: 1762 - DNA, 30 bp, Homo sapiens
  source 1..30: mol_type = unassigned DNA
ttcttttcggaagcaaattacatagagtgt

SEQ ID NO: 1763 - DNA, 30 bp, Homo sapiens
  source 1..30: mol_type = unassigned DNA
acatttttcttttcggaagcaaattacata

SEQ ID NO: 1764 - DNA, 30 bp, Homo sapiens
  source 1..30: mol_type = unassigned DNA
agagagatgggaaaagtgggttaacatttt

SEQ ID NO: 1765 - DNA, 30 bp, Homo sapiens
  source 1..30: mol_type = unassigned DNA
aagagagatgggaaaagtgggttaacattt

SEQ ID NO: 1766 - DNA, 30 bp, Homo sapiens
  source 1..30: mol_type = unassigned DNA
taagagagatgggaaaagtgggttaacatt

SEQ ID NO: 1767 - DNA, 30 bp, Homo sapiens
  source 1..30: mol_type = unassigned DNA
tgcttttaagagagatgggaaaagtgggtt

SEQ ID NO: 1768 - DNA, 30 bp, Homo sapiens
  source 1..30: mol_type = unassigned DNA
ttctgcttttaagagagatgggaaaagtgg

SEQ ID NO: 1769 - DNA, 30 bp, Homo sapiens
  source 1..30: mol_type = unassigned DNA
caagagagacctgaccactgaccccgccct

SEQ ID NO: 1770 - DNA, 30 bp, Homo sapiens
  source 1..30: mol_type = unassigned DNA
gaaagggggtcgggtggggagcgcagcgtg

SEQ ID NO: 1771 - DNA, 30 bp, Homo sapiens
  source 1..30: mol_type = unassigned DNA
attcgaaagggggtcgggtggggagcgcag

SEQ ID NO: 1772 - DNA, 30 bp, Homo sapiens
  source 1..30: mol_type = unassigned DNA
tgtgcggaccagcggtcccggggggaggca

SEQ ID NO: 1773 - DNA, 30 bp, Homo sapiens
  source 1..30: mol_type = unassigned DNA
gtgtgcggaccagcggtcccggggggaggc

SEQ ID NO: 1774 - DNA, 30 bp, Homo sapiens
  source 1..30: mol_type = unassigned DNA
cgggaaaagcttctagaacctagacatgtg

SEQ ID NO: 1775 - DNA, 30 bp, Homo sapiens
  source 1..30: mol_type = unassigned DNA
tttgtgtgcggaccagcggtcccgggggga

SEQ ID NO: 1776 - DNA, 30 bp, Homo sapiens
  source 1..30: mol_type = unassigned DNA
tagaacctagacatgtgtatgtataataat

SEQ ID NO: 1777 - DNA, 30 bp, Homo sapiens
  source 1..30: mol_type = unassigned DNA
agccacgcgaaatttccgttttgtgggtca

SEQ ID NO: 1778 - DNA, 30 bp, Homo sapiens
  source 1..30: mol_type = unassigned DNA
ttttcccccagcccaagccccccgcccacc

SEQ ID NO: 1779 - DNA, 30 bp, Homo sapiens
  source 1..30: mol_type = unassigned DNA
tcgcccacccacggtccgcggagctcgggg

SEQ ID NO: 1780 - DNA, 30 bp, Homo sapiens
  source 1..30: mol_type = unassigned DNA
agggagggctgtctcttctcgcccacccac

SEQ ID NO: 1781 - DNA, 30 bp, Homo sapiens
  source 1..30: mol_type = unassigned DNA
ccagggattcagggagggctgtctcttctc

SEQ ID NO: 1782 - DNA, 30 bp, Homo sapiens
  source 1..30: mol_type = unassigned DNA
atgtgcgcagacccccggcgtggctctcag

SEQ ID NO: 1783 - DNA, 30 bp, Homo sapiens
  source 1..30: mol_type = unassigned DNA
agccccgcagtccacaacggcccgagcacc

SEQ ID NO: 1784 - DNA, 30 bp, Homo sapiens
  source 1..30: mol_type = unassigned DNA
cagccccgcagtccacaacggcccgagcac

SEQ ID NO: 1785 - DNA, 30 bp, Homo sapiens
  source 1..30: mol_type = unassigned DNA
tcagccccgcagtccacaacggcccgagca

SEQ ID NO: 1786 - DNA, 30 bp, Homo sapiens
  source 1..30: mol_type = unassigned DNA
ttcagccccgcagtccacaacggcccgagc

SEQ ID NO: 1787 - DNA, 30 bp, Homo sapiens
  source 1..30: mol_type = unassigned DNA
tttcagccccgcagtccacaacggcccgag

SEQ ID NO: 1788 - DNA, 30 bp, Homo sapiens
  source 1..30: mol_type = unassigned DNA
agctgtatgcagtcctggaacctctttttt

SEQ ID NO: 1789 - DNA, 30 bp, Homo sapiens
  source 1..30: mol_type = unassigned DNA
caggatgcggagacagggaaagctgccgaa

SEQ ID NO: 1790 - DNA, 30 bp, Homo sapiens
  source 1..30: mol_type = unassigned DNA
gttgcaggatgcggagacagggaaagctgc

SEQ ID NO: 1791 - DNA, 30 bp, Homo sapiens
  source 1..30: mol_type = unassigned DNA
tggcgctcagtggccccggggtgaaaaggc

SEQ ID NO: 1792 - DNA, 30 bp, Homo sapiens
  source 1..30: mol_type = unassigned DNA
agtgcccacggttctggcgctcagtggccc

SEQ ID NO: 1793 - DNA, 30 bp, Homo sapiens
  source 1..30: mol_type = unassigned DNA
tgccttgagtgcccacggttctggcgctca

SEQ ID NO: 1794 - DNA, 30 bp, Homo sapiens
  source 1..30: mol_type = unassigned DNA
gtcttgtgccttgagtgcccacggttctgg

SEQ ID NO: 1795 - DNA, 30 bp, Homo sapiens
  source 1..30: mol_type = unassigned DNA
atccgcaattggtcttgtgccttgagtgcc

SEQ ID NO: 1796 - DNA, 30 bp, Homo sapiens
  source 1..30: mol_type = unassigned DNA
agggccttcatccgcaattggtcttgtgcc

SEQ ID NO: 1797 - DNA, 30 bp, Homo sapiens
  source 1..30: mol_type = unassigned DNA
tggattcagggccttcatccgcaattggtc

SEQ ID NO: 1798 - DNA, 30 bp, Homo sapiens
  source 1..30: mol_type = unassigned DNA
ataagctcagagagacaagacagtggagac

SEQ ID NO: 1799 - DNA, 30 bp, Homo sapiens
  source 1..30: mol_type = unassigned DNA
cataagctcagagagacaagacagtggaga

SEQ ID NO: 1800 - DNA, 30 bp, Homo sapiens
  source 1..30: mol_type = unassigned DNA
tgggtcagacagtgccaaatatcggcaatt

SEQ ID NO: 1801 - DNA, 30 bp, Homo sapiens
  source 1..30: mol_type = unassigned DNA
gtgggtcagacagtgccaaatatcggcaat

SEQ ID NO: 1802 - DNA, 30 bp, Homo sapiens
  source 1..30: mol_type = unassigned DNA
tgtgggtcagacagtgccaaatatcggcaa

SEQ ID NO: 1803 - DNA, 30 bp, Homo sapiens
  source 1..30: mol_type = unassigned DNA
cgttttgtgggtcagacagtgccaaatatc

SEQ ID NO: 1804 - DNA, 30 bp, Homo sapiens
  source 1..30: mol_type = unassigned DNA
ccgttttgtgggtcagacagtgccaaatat

SEQ ID NO: 1805 - DNA, 30 bp, Homo sapiens
  source 1..30: mol_type = unassigned DNA
agttaagccacgcgaaatttccgttttgtg

SEQ ID NO: 1806 - DNA, 30 bp, Homo sapiens
  source 1..30: mol_type = unassigned DNA
ctttgtgtgcggaccagcggtcccgggggg

SEQ ID NO: 1807 - DNA, 30 bp, Homo sapiens
  source 1..30: mol_type = unassigned DNA
gaaggcgctggggtggggtttctttgtgtg

SEQ ID NO: 1808 - DNA, 30 bp, Homo sapiens
  source 1..30: mol_type = unassigned DNA
gggcaagggaggggaaggagagaggaagtc

SEQ ID NO: 1809 - DNA, 30 bp, Homo sapiens
  source 1..30: mol_type = unassigned DNA
agggacattttggaaagtgctttataacga

SEQ ID NO: 1810 - DNA, 30 bp, Homo sapiens
  source 1..30: mol_type = unassigned DNA
aatgggcttaagggacattttggaaagtgc

SEQ ID NO: 1811 - DNA, 30 bp, Homo sapiens
  source 1..30: mol_type = unassigned DNA
ccttaaatgggcttaagggacattttggaa

SEQ ID NO: 1812 - DNA, 30 bp, Homo sapiens
  source 1..30: mol_type = unassigned DNA
gccttaaatgggcttaagggacattttgga

SEQ ID NO: 1813 - DNA, 30 bp, Homo sapiens
  source 1..30: mol_type = unassigned DNA
actgtttgccttaaatgggcttaagggaca

SEQ ID NO: 1814 - DNA, 30 bp, Homo sapiens
  source 1..30: mol_type = unassigned DNA
ggactcaatcgtgaggggaggaagctacct

SEQ ID NO: 1815 - DNA, 30 bp, Homo sapiens
  source 1..30: mol_type = unassigned DNA
aaattaggactcaatcgtgaggggaggaag

SEQ ID NO: 1816 - DNA, 30 bp, Homo sapiens
  source 1..30: mol_type = unassigned DNA
aaaattaggactcaatcgtgaggggaggaa

SEQ ID NO: 1817 - DNA, 30 bp, Homo sapiens
  source 1..30: mol_type = unassigned DNA
catatttaaaattaggactcaatcgtgagg

SEQ ID NO: 1818 - DNA, 30 bp, Homo sapiens
  source 1..30: mol_type = unassigned DNA
ccatatttaaaattaggactcaatcgtgag

SEQ ID NO: 1819 - DNA, 30 bp, Homo sapiens
  source 1..30: mol_type = unassigned DNA
tgtttccatatttaaaattaggactcaatc

SEQ ID NO: 1820 - DNA, 30 bp, Homo sapiens
  source 1..30: mol_type = unassigned DNA
ttctgtttccatatttaaaattaggactca

SEQ ID NO: 1821 - DNA, 30 bp, Homo sapiens
  source 1..30: mol_type = unassigned DNA
attctgtttccatatttaaaattaggactc

SEQ ID NO: 1822 - DNA, 30 bp, Homo sapiens
  source 1..30: mol_type = unassigned DNA
ccctcctatgggtagagaatttattctgtt

SEQ ID NO: 1823 - DNA, 30 bp, Homo sapiens
  source 1..30: mol_type = unassigned DNA
aaaggtagaagcgggtaagttgccctccta

SEQ ID NO: 1824 - DNA, 30 bp, Homo sapiens
  source 1..30: mol_type = unassigned DNA
aaaaggtagaagcgggtaagttgccctcct

SEQ ID NO: 1825 - DNA, 30 bp, Homo sapiens
  source 1..30: mol_type = unassigned DNA
taaaaggtagaagcgggtaagttgccctcc

SEQ ID NO: 1826 - DNA, 30 bp, Homo sapiens
  source 1..30: mol_type = unassigned DNA
ttttaaaaggtagaagcgggtaagttgccc

SEQ ID NO: 1827 - DNA, 30 bp, Homo sapiens
  source 1..30: mol_type = unassigned DNA
cttttaaaaggtagaagcgggtaagttgcc

SEQ ID NO: 1828 - DNA, 30 bp, Homo sapiens
  source 1..30: mol_type = unassigned DNA
tgggggaggtgggagggcagagaagaggtc

SEQ ID NO: 1829 - DNA, 30 bp, Homo sapiens
  source 1..30: mol_type = unassigned DNA
atggtaacacaggaccaggaaggacagggc

SEQ ID NO: 1830 - DNA, 30 bp, Homo sapiens
  source 1..30: mol_type = unassigned DNA
taaagaaaaagatgttaatggtaacacagg

SEQ ID NO: 1831 - DNA, 30 bp, Homo sapiens
  source 1..30: mol_type = unassigned DNA
ataaagaaaaagatgttaatggtaacacag

SEQ ID NO: 1832 - DNA, 30 bp, Homo sapiens
  source 1..30: mol_type = unassigned DNA
tataaagaaaaagatgttaatggtaacaca

SEQ ID NO: 1833 - DNA, 30 bp, Homo sapiens
  source 1..30: mol_type = unassigned DNA
agagatattttataaagaaaaagatgttaa

SEQ ID NO: 1834 - DNA, 30 bp, Homo sapiens
  source 1..30: mol_type = unassigned DNA
agctctagaagcattcagagatattttata

SEQ ID NO: 1835 - DNA, 30 bp, Homo sapiens
  source 1..30: mol_type = unassigned DNA
tgagaacaaaaataaaaatgttcctcaccc

SEQ ID NO: 1836 - DNA, 30 bp, Homo sapiens
  source 1..30: mol_type = unassigned DNA
tggaaagtgctttataacgacctttttttt

SEQ ID NO: 1837 - DNA, 30 bp, Homo sapiens
  source 1..30: mol_type = unassigned DNA
ggaaagtgctttataacgaccttttttttt

SEQ ID NO: 1838 - DNA, 30 bp, Homo sapiens
  source 1..30: mol_type = unassigned DNA
gaaagtgctttataacgacctttttttttt

SEQ ID NO: 1839 - DNA, 30 bp, Homo sapiens
  source 1..30: mol_type = unassigned DNA
ataacgaccttttttttttttatttcttct

SEQ ID NO: 1840 - DNA, 30 bp, Homo sapiens
  source 1..30: mol_type = unassigned DNA
agggcaagggaggggaaggagagaggaagt

SEQ ID NO: 1841 - DNA, 30 bp, Homo sapiens
  source 1..30: mol_type = unassigned DNA
tagggcaagggaggggaaggagagaggaag

SEQ ID NO: 1842 - DNA, 30 bp, Homo sapiens
  source 1..30: mol_type = unassigned DNA
ttttagggcaagggaggggaaggagagagg

SEQ ID NO: 1843 - DNA, 30 bp, Homo sapiens
  source 1..30: mol_type = unassigned DNA
gttttagggcaagggaggggaaggagagag

SEQ ID NO: 1844 - DNA, 30 bp, Homo sapiens
  source 1..30: mol_type = unassigned DNA
tctcgtcgaagaaaccgctagtcctggggt

SEQ ID NO: 1845 - DNA, 30 bp, Homo sapiens
  source 1..30: mol_type = unassigned DNA
cggtattgtctcgtcgaagaaaccgctagt

SEQ ID NO: 1846 - DNA, 30 bp, Homo sapiens
  source 1..30: mol_type = unassigned DNA
acggtattgtctcgtcgaagaaaccgctag

SEQ ID NO: 1847 - DNA, 30 bp, Homo sapiens
  source 1..30: mol_type = unassigned DNA
tacggtattgtctcgtcgaagaaaccgcta

SEQ ID NO: 1848 - DNA, 30 bp, Homo sapiens
  source 1..30: mol_type = unassigned DNA
aaagatgggtggagacggggggaggggatg

SEQ ID NO: 1849 - DNA, 30 bp, Homo sapiens
  source 1..30: mol_type = unassigned DNA
gaaagatgggtggagacggggggaggggat

SEQ ID NO: 1850 - DNA, 30 bp, Homo sapiens
  source 1..30: mol_type = unassigned DNA
caaagtcaaagcggtcccatcccgctgttt

SEQ ID NO: 1851 - DNA, 30 bp, Homo sapiens
  source 1..30: mol_type = unassigned DNA
agaagaaaataggaaaggggtaaagggaag

SEQ ID NO: 1852 - DNA, 30 bp, Homo sapiens
  source 1..30: mol_type = unassigned DNA
aagaagaaaataggaaaggggtaaagggaa

SEQ ID NO: 1853 - DNA, 30 bp, Homo sapiens
  source 1..30: mol_type = unassigned DNA
tttcccccagcccaagccccccgcccaccc

SEQ ID NO: 1854 - DNA, 30 bp, Homo sapiens
  source 1..30: mol_type = unassigned DNA
tctagtttaagaagaaaataggaaaggggt

SEQ ID NO: 1855 - DNA, 30 bp, Homo sapiens
  source 1..30: mol_type = unassigned DNA
cttctctagtttaagaagaaaataggaaag

SEQ ID NO: 1856 - DNA, 30 bp, Homo sapiens
  source 1..30: mol_type = unassigned DNA
tttcttctctagtttaagaagaaaatagga

SEQ ID NO: 1857 - DNA, 30 bp, Homo sapiens
  source 1..30: mol_type = unassigned DNA
atttcttctctagtttaagaagaaaatagg

SEQ ID NO: 1858 - DNA, 30 bp, Homo sapiens
  source 1..30: mol_type = unassigned DNA
tatttcttctctagtttaagaagaaaatag

SEQ ID NO: 1859 - DNA, 30 bp, Homo sapiens
  source 1..30: mol_type = unassigned DNA
ttatttcttctctagtttaagaagaaaata

SEQ ID NO: 1860 - DNA, 30 bp, Homo sapiens
  source 1..30: mol_type = unassigned DNA
tttatttcttctctagtttaagaagaaaat

SEQ ID NO: 1861 - DNA, 30 bp, Homo sapiens
  source 1..30: mol_type = unassigned DNA
ttttatttcttctctagtttaagaagaaaa

SEQ ID NO: 1862 - DNA, 30 bp, Homo sapiens
  source 1..30: mol_type = unassigned DNA
tttttatttcttctctagtttaagaagaaa

SEQ ID NO: 1863 - DNA, 30 bp, Homo sapiens
  source 1..30: mol_type = unassigned DNA
ttttttatttcttctctagtttaagaagaa

SEQ ID NO: 1864 - DNA, 30 bp, Homo sapiens
  source 1..30: mol_type = unassigned DNA
tttttttatttcttctctagtttaagaaga

SEQ ID NO: 1865 - DNA, 30 bp, Homo sapiens
  source 1..30: mol_type = unassigned DNA
ttttttttatttcttctctagtttaagaag

SEQ ID NO: 1866 - DNA, 30 bp, Homo sapiens
  source 1..30: mol_type = unassigned DNA
tttttttttatttcttctctagtttaagaa

SEQ ID NO: 1867 - DNA, 30 bp, Homo sapiens
  source 1..30: mol_type = unassigned DNA
taacgaccttttttttttttatttcttctc

SEQ ID NO: 1868 - DNA, 30 bp, Homo sapiens
  source 1..30: mol_type = unassigned DNA
ttctctagtttaagaagaaaataggaaagg

SEQ ID NO: 1869 - DNA, 30 bp, Homo sapiens
  source 1..30: mol_type = unassigned DNA
ttcccccagcccaagccccccgcccaccct

SEQ ID NO: 1870 - DNA, 30 bp, Homo sapiens
  source 1..30: mol_type = unassigned DNA
tcccccagcccaagccccccgcccaccctc

SEQ ID NO: 1871 - DNA, 30 bp, Homo sapiens
  source 1..30: mol_type = unassigned DNA
cccccagcccaagccccccgcccaccctct

SEQ ID NO: 1872 - DNA, 30 bp, Homo sapiens
  source 1..30: mol_type = unassigned DNA
tggccataatttaactgcatttgcaaatca

SEQ ID NO: 1873 - DNA, 30 bp, Homo sapiens
  source 1..30: mol_type = unassigned DNA
ctggccataatttaactgcatttgcaaatc

SEQ ID NO: 1874 - DNA, 30 bp, Homo sapiens
  source 1..30: mol_type = unassigned DNA
atacagcctcaatcctacacagatacatgg

SEQ ID NO: 1875 - DNA, 30 bp, Homo sapiens
  source 1..30: mol_type = unassigned DNA
ttgatacagcctcaatcctacacagataca

SEQ ID NO: 1876 - DNA, 30 bp, Homo sapiens
  source 1..30: mol_type = unassigned DNA
caactgctgattcttgatacagcctcaatc

SEQ ID NO: 1877 - DNA, 30 bp, Homo sapiens
  source 1..30: mol_type = unassigned DNA
ttccaactgctgattcttgatacagcctca

SEQ ID NO: 1878 - DNA, 30 bp, Homo sapiens
  source 1..30: mol_type = unassigned DNA
ccctgaaactgttcttccaactgctgattc

SEQ ID NO: 1879 - DNA, 30 bp, Homo sapiens
  source 1..30: mol_type = unassigned DNA
cccctgaaactgttcttccaactgctgatt

SEQ ID NO: 1880 - DNA, 30 bp, Homo sapiens
  source 1..30: mol_type = unassigned DNA
tcccctgaaactgttcttccaactgctgat

SEQ ID NO: 1881 - DNA, 30 bp, Homo sapiens
  source 1..30: mol_type = unassigned DNA
ttcccctgaaactgttcttccaactgctga

SEQ ID NO: 1882 - DNA, 30 bp, Homo sapiens
  source 1..30: mol_type = unassigned DNA
tttcccctgaaactgttcttccaactgctg

SEQ ID NO: 1883 - DNA, 30 bp, Homo sapiens
  source 1..30: mol_type = unassigned DNA
agttttttcccctgaaactgttcttccaac

SEQ ID NO: 1884 - DNA, 30 bp, Homo sapiens
  source 1..30: mol_type = unassigned DNA
aagttttttcccctgaaactgttcttccaa

SEQ ID NO: 1885 - DNA, 30 bp, Homo sapiens
  source 1..30: mol_type = unassigned DNA
taagttttttcccctgaaactgttcttcca

SEQ ID NO: 1886 - DNA, 30 bp, Homo sapiens
  source 1..30: mol_type = unassigned DNA
tgcacaaaattttaagttttttcccctgaa

SEQ ID NO: 1887 - DNA, 30 bp, Homo sapiens
  source 1..30: mol_type = unassigned DNA
atgcacaaaattttaagttttttcccctga

SEQ ID NO: 1888 - DNA, 30 bp, Homo sapiens
  source 1..30: mol_type = unassigned DNA
tatctataaatatataaatatagtttatgc

SEQ ID NO: 1889 - DNA, 30 bp, Homo sapiens
  source 1..30: mol_type = unassigned DNA
aacataaggttatatctataaatatataaa

SEQ ID NO: 1890 - DNA, 30 bp, Homo sapiens
  source 1..30: mol_type = unassigned DNA
agatgatcttcaacataaggttatatctat

SEQ ID NO: 1891 - DNA, 30 bp, Homo sapiens
  source 1..30: mol_type = unassigned DNA
tggctgcaatgggtgagaatacacatatat

SEQ ID NO: 1892 - DNA, 30 bp, Homo sapiens
  source 1..30: mol_type = unassigned DNA
gtggctgcaatgggtgagaatacacatata

SEQ ID NO: 1893 - DNA, 30 bp, Homo sapiens
  source 1..30: mol_type = unassigned DNA
tttgtggctgcaatgggtgagaatacacat

SEQ ID NO: 1894 - DNA, 30 bp, Homo sapiens
  source 1..30: mol_type = unassigned DNA
tctgcaaagaattgtttgtggctgcaatgg

SEQ ID NO: 1895 - DNA, 30 bp, Homo sapiens
  source 1..30: mol_type = unassigned DNA
ctggaaaattctctgcaaagaattgtttgt

SEQ ID NO: 1896 - DNA, 30 bp, Homo sapiens
  source 1..30: mol_type = unassigned DNA
tgtgccaacgattgctggaaaattctctgc

SEQ ID NO: 1897 - DNA, 30 bp, Homo sapiens
  source 1..30: mol_type = unassigned DNA
gtgtgccaacgattgctggaaaattctctg

SEQ ID NO: 1898 - DNA, 30 bp, Homo sapiens
  source 1..30: mol_type = unassigned DNA
ctaagagcagggtttgtgtgccaacgattg

SEQ ID NO: 1899 - DNA, 30 bp, Homo sapiens
  source 1..30: mol_type = unassigned DNA
aactgcatttgcaaatcatgaaaaaaacac

SEQ ID NO: 1900 - DNA, 30 bp, Homo sapiens
  source 1..30: mol_type = unassigned DNA
gcaaatcatgaaaaaaacactacttctgca

SEQ ID NO: 1901 - DNA, 30 bp, Homo sapiens
  source 1..30: mol_type = unassigned DNA
caaatcatgaaaaaaacactacttctgcag

SEQ ID NO: 1902 - DNA, 30 bp, Homo sapiens
  source 1..30: mol_type = unassigned DNA
tgcagtattaaaataatagattttgaaatt

SEQ ID NO: 1903 - DNA, 30 bp, Homo sapiens
  source 1..30: mol_type = unassigned DNA
gtcagaatttcaggataaaactgaaagaaa

SEQ ID NO: 1904 - DNA, 30 bp, Homo sapiens
  source 1..30: mol_type = unassigned DNA
ggtcagaatttcaggataaaactgaaagaa

SEQ ID NO: 1905 - DNA, 30 bp, Homo sapiens
  source 1..30: mol_type = unassigned DNA
tgaatggatatataagtaactagaaatgaa

SEQ ID NO: 1906 - DNA, 30 bp, Homo sapiens
  source 1..30: mol_type = unassigned DNA
taatgaagtgggcaccttctgaatggatat

SEQ ID NO: 1907 - DNA, 30 bp, Homo sapiens
  source 1..30: mol_type = unassigned DNA
ctaatgaagtgggcaccttctgaatggata

SEQ ID NO: 1908 - DNA, 30 bp, Homo sapiens
  source 1..30: mol_type = unassigned DNA
tctaatgaagtgggcaccttctgaatggat

SEQ ID NO: 1909 - DNA, 30 bp, Homo sapiens
  source 1..30: mol_type = unassigned DNA
tcttttctaatgaagtgggcaccttctgaa

SEQ ID NO: 1910 - DNA, 30 bp, Homo sapiens
  source 1..30: mol_type = unassigned DNA
cccattatcttttctaatgaagtgggcacc

SEQ ID NO: 1911 - DNA, 30 bp, Homo sapiens
  source 1..30: mol_type = unassigned DNA
taagaggtgcatataatattccccattatc

SEQ ID NO: 1912 - DNA, 30 bp, Homo sapiens
  source 1..30: mol_type = unassigned DNA
agcatgattgtaagaggtgcatataatatt

SEQ ID NO: 1913 - DNA, 30 bp, Homo sapiens
  source 1..30: mol_type = unassigned DNA
tgtattcagcatgattgtaagaggtgcata

SEQ ID NO: 1914 - DNA, 30 bp, Homo sapiens
  source 1..30: mol_type = unassigned DNA
aacaattatgtattcagcatgattgtaaga

SEQ ID NO: 1915 - DNA, 30 bp, Homo sapiens
  source 1..30: mol_type = unassigned DNA
attaaacaattatgtattcagcatgattgt

SEQ ID NO: 1916 - DNA, 30 bp, Homo sapiens
  source 1..30: mol_type = unassigned DNA
atgtggctaagatacatgtgcaagtgcttg

SEQ ID NO: 1917 - DNA, 30 bp, Homo sapiens
  source 1..30: mol_type = unassigned DNA
ctgattcattaaacaattatgtattcagca

SEQ ID NO: 1918 - DNA, 30 bp, Homo sapiens
  source 1..30: mol_type = unassigned DNA
tcctgattcattaaacaattatgtattcag

SEQ ID NO: 1919 - DNA, 30 bp, Homo sapiens
  source 1..30: mol_type = unassigned DNA
ttcctgattcattaaacaattatgtattca

SEQ ID NO: 1920 - DNA, 30 bp, Homo sapiens
  source 1..30: mol_type = unassigned DNA
tttcctgattcattaaacaattatgtattc

SEQ ID NO: 1921 - DNA, 30 bp, Homo sapiens
  source 1..30: mol_type = unassigned DNA
tcagggcgagtgcttttttcctgattcatt

SEQ ID NO: 1922 - DNA, 30 bp, Homo sapiens
  source 1..30: mol_type = unassigned DNA
attatcagggcgagtgcttttttcctgatt

SEQ ID NO: 1923 - DNA, 30 bp, Homo sapiens
  source 1..30: mol_type = unassigned DNA
aaagataattaattatcagggcgagtgctt

SEQ ID NO: 1924 - DNA, 30 bp, Homo sapiens
  source 1..30: mol_type = unassigned DNA
caaagataattaattatcagggcgagtgct

SEQ ID NO: 1925 - DNA, 30 bp, Homo sapiens
  source 1..30: mol_type = unassigned DNA
caatttcaaagataattaattatcagggcg

SEQ ID NO: 1926 - DNA, 30 bp, Homo sapiens
  source 1..30: mol_type = unassigned DNA
attccaatttcaaagataattaattatcag

SEQ ID NO: 1927 - DNA, 30 bp, Homo sapiens
  source 1..30: mol_type = unassigned DNA
aaattaattccaatttcaaagataattaat

SEQ ID NO: 1928 - DNA, 30 bp, Homo sapiens
  source 1..30: mol_type = unassigned DNA
gaaattaattccaatttcaaagataattaa

SEQ ID NO: 1929 - DNA, 30 bp, Homo sapiens
  source 1..30: mol_type = unassigned DNA
tgaaattaattccaatttcaaagataatta

SEQ ID NO: 1930 - DNA, 30 bp, Homo sapiens
  source 1..30: mol_type = unassigned DNA
aaataatagattttgaaattaattccaatt

SEQ ID NO: 1931 - DNA, 30 bp, Homo sapiens
  source 1..30: mol_type = unassigned DNA
cctgattcattaaacaattatgtattcagc

SEQ ID NO: 1932 - DNA, 30 bp, Homo sapiens
  source 1..30: mol_type = unassigned DNA
aggataaaactgaaagaaatggcagtagtt

SEQ ID NO: 1933 - DNA, 30 bp, Homo sapiens
  source 1..30: mol_type = unassigned DNA
tgtatgttcatgtggctaagatacatgtgc

SEQ ID NO: 1934 - DNA, 30 bp, Homo sapiens
  source 1..30: mol_type = unassigned DNA
cttcctgccaggattatgtatgttcatgtg

SEQ ID NO: 1935 - DNA, 30 bp, Homo sapiens
  source 1..30: mol_type = unassigned DNA
atgattcagtagccttgtttgttctcattt

SEQ ID NO: 1936 - DNA, 30 bp, Homo sapiens
  source 1..30: mol_type = unassigned DNA
aatgattcagtagccttgtttgttctcatt

SEQ ID NO: 1937 - DNA, 30 bp, Homo sapiens
  source 1..30: mol_type = unassigned DNA
tttaatgattcagtagccttgtttgttctc

SEQ ID NO: 1938 - DNA, 30 bp, Homo sapiens
  source 1..30: mol_type = unassigned DNA
ttatttaatgattcagtagccttgtttgtt

SEQ ID NO: 1939 - DNA, 30 bp, Homo sapiens
  source 1..30: mol_type = unassigned DNA
ttattatttaatgattcagtagccttgttt

SEQ ID NO: 1940 - DNA, 30 bp, Homo sapiens
  source 1..30: mol_type = unassigned DNA
aaatcgttgttattatttaatgattcagta

SEQ ID NO: 1941 - DNA, 30 bp, Homo sapiens
  source 1..30: mol_type = unassigned DNA
caaatcgttgttattatttaatgattcagt

SEQ ID NO: 1942 - DNA, 30 bp, Homo sapiens
  source 1..30: mol_type = unassigned DNA
tcatttcaaatcgttgttattatttaatga

SEQ ID NO: 1943 - DNA, 30 bp, Homo sapiens
  source 1..30: mol_type = unassigned DNA
ttatcatttcaaatcgttgttattatttaa

SEQ ID NO: 1944 - DNA, 30 bp, Homo sapiens
  source 1..30: mol_type = unassigned DNA
cgctgcaggctagtggctgcaaactcatcg

SEQ ID NO: 1945 - DNA, 30 bp, Homo sapiens
  source 1..30: mol_type = unassigned DNA
ccgctgcaggctagtggctgcaaactcatc

SEQ ID NO: 1946 - DNA, 30 bp, Homo sapiens
  source 1..30: mol_type = unassigned DNA
tgcacccctcagaaaggtttccgctgcagg

SEQ ID NO: 1947 - DNA, 30 bp, Homo sapiens
  source 1..30: mol_type = unassigned DNA
ctgcacccctcagaaaggtttccgctgcag

SEQ ID NO: 1948 - DNA, 30 bp, Homo sapiens
  source 1..30: mol_type = unassigned DNA
tgagaatgggtggtgggggcgatctcgcct

SEQ ID NO: 1949 - DNA, 30 bp, Homo sapiens
  source 1..30: mol_type = unassigned DNA
actcgcacgtccagaaaggttctgagaatg

SEQ ID NO: 1950 - DNA, 30 bp, Homo sapiens
  source 1..30: mol_type = unassigned DNA
gcagttcactcgcacgtccagaaaggttct

SEQ ID NO: 1951 - DNA, 30 bp, Homo sapiens
  source 1..30: mol_type = unassigned DNA
cacaattcgcagttcactcgcacgtccaga

SEQ ID NO: 1952 - DNA, 30 bp, Homo sapiens
  source 1..30: mol_type = unassigned DNA
ccacaattcgcagttcactcgcacgtccag

SEQ ID NO: 1953 - DNA, 30 bp, Homo sapiens
  source 1..30: mol_type = unassigned DNA
tgcgcagtgtcctgagctacccccgctttc

SEQ ID NO: 1954 - DNA, 30 bp, Homo sapiens
  source 1..30: mol_type = unassigned DNA
ctgcgcagtgtcctgagctacccccgcttt

SEQ ID NO: 1955 - DNA, 30 bp, Homo sapiens
  source 1..30: mol_type = unassigned DNA
ggcgctcgcccccgcggtgcagccggggag

SEQ ID NO: 1956 - DNA, 30 bp, Homo sapiens
  source 1..30: mol_type = unassigned DNA
tctaagggagaccctcgctcctccagcggg

SEQ ID NO: 1957 - DNA, 30 bp, Homo sapiens
  source 1..30: mol_type = unassigned DNA
cagaatggagaccccgcgaggggcttctct

SEQ ID NO: 1958 - DNA, 30 bp, Homo sapiens
  source 1..30: mol_type = unassigned DNA
ccagaatggagaccccgcgaggggcttctc

SEQ ID NO: 1959 - DNA, 30 bp, Homo sapiens
  source 1..30: mol_type = unassigned DNA
tccagaatggagaccccgcgaggggcttct

SEQ ID NO: 1960 - DNA, 30 bp, Homo sapiens
  source 1..30: mol_type = unassigned DNA
tctatgattttccagaatggagaccccgcg

SEQ ID NO: 1961 - DNA, 30 bp, Homo sapiens
  source 1..30: mol_type = unassigned DNA
ccccagcccaagccccccgcccaccctctg

SEQ ID NO: 1962 - DNA, 30 bp, Homo sapiens
  source 1..30: mol_type = unassigned DNA
agtagccttgtttgttctcatttgttcaaa

SEQ ID NO: 1963 - DNA, 30 bp, Homo sapiens
  source 1..30: mol_type = unassigned DNA
tttgttctcatttgttcaaaagggacgtgg

SEQ ID NO: 1964 - DNA, 30 bp, Homo sapiens
  source 1..30: mol_type = unassigned DNA
gttctcatttgttcaaaagggacgtggatt

SEQ ID NO: 1965 - DNA, 30 bp, Homo sapiens
  source 1..30: mol_type = unassigned DNA
ttctcatttgttcaaaagggacgtggattg

SEQ ID NO: 1966 - DNA, 30 bp, Homo sapiens
  source 1..30: mol_type = unassigned DNA
gcttcctgccaggattatgtatgttcatgt

SEQ ID NO: 1967 - DNA, 30 bp, Homo sapiens
  source 1..30: mol_type = unassigned DNA
tgcttcctgccaggattatgtatgttcatg

SEQ ID NO: 1968 - DNA, 30 bp, Homo sapiens
  source 1..30: mol_type = unassigned DNA
ttgcttcctgccaggattatgtatgttcat

SEQ ID NO: 1969 - DNA, 30 bp, Homo sapiens
  source 1..30: mol_type = unassigned DNA
taaagcaaatatatttttgcttcctgccag

SEQ ID NO: 1970 - DNA, 30 bp, Homo sapiens
  source 1..30: mol_type = unassigned DNA
agttataaagcaaatatatttttgcttcct

SEQ ID NO: 1971 - DNA, 30 bp, Homo sapiens
  source 1..30: mol_type = unassigned DNA
aagttataaagcaaatatatttttgcttcc

SEQ ID NO: 1972 - DNA, 30 bp, Homo sapiens
  source 1..30: mol_type = unassigned DNA
taagttataaagcaaatatatttttgcttc

SEQ ID NO: 1973 - DNA, 30 bp, Homo sapiens
  source 1..30: mol_type = unassigned DNA
attttaagttataaagcaaatatatttttg

SEQ ID NO: 1974 - DNA, 30 bp, Homo sapiens
  source 1..30: mol_type = unassigned DNA
ttcattttaagttataaagcaaatatattt

SEQ ID NO: 1975 - DNA, 30 bp, Homo sapiens
  source 1..30: mol_type = unassigned DNA
tctccagttgttcattttaagttataaagc

SEQ ID NO: 1976 - DNA, 30 bp, Homo sapiens
  source 1..30: mol_type = unassigned DNA
gtctccagttgttcattttaagttataaag

SEQ ID NO: 1977 - DNA, 30 bp, Homo sapiens
  source 1..30: mol_type = unassigned DNA
ccccacaaaaaggtaaatttgtctccagtt

SEQ ID NO: 1978 - DNA, 30 bp, Homo sapiens
  source 1..30: mol_type = unassigned DNA
cccccacaaaaaggtaaatttgtctccagt

SEQ ID NO: 1979 - DNA, 30 bp, Homo sapiens
  source 1..30: mol_type = unassigned DNA
ctgccaggattatgtatgttcatgtggcta

SEQ ID NO: 1980 - DNA, 30 bp, Homo sapiens
  source 1..30: mol_type = unassigned DNA
ccctcatccctttcccccacaaaaaggtaa

SEQ ID NO: 1981 - DNA, 30 bp, Homo sapiens
  source 1..30: mol_type = unassigned DNA
cttcctcctaattgccctcatccctttccc

SEQ ID NO: 1982 - DNA, 30 bp, Homo sapiens
  source 1..30: mol_type = unassigned DNA
gcttcctcctaattgccctcatccctttcc

SEQ ID NO: 1983 - DNA, 30 bp, Homo sapiens
  source 1..30: mol_type = unassigned DNA
gctttgcttcctcctaattgccctcatccc

SEQ ID NO: 1984 - DNA, 30 bp, Homo sapiens
  source 1..30: mol_type = unassigned DNA
cgttcgctttgcttcctcctaattgccctc

SEQ ID NO: 1985 - DNA, 30 bp, Homo sapiens
  source 1..30: mol_type = unassigned DNA
ttgcgttcgctttgcttcctcctaattgcc

SEQ ID NO: 1986 - DNA, 30 bp, Homo sapiens
  source 1..30: mol_type = unassigned DNA
acccttgttgcgttcgctttgcttcctcct

SEQ ID NO: 1987 - DNA, 30 bp, Homo sapiens
  source 1..30: mol_type = unassigned DNA
aggattaacccttgttgcgttcgctttgct

SEQ ID NO: 1988 - DNA, 30 bp, Homo sapiens
  source 1..30: mol_type = unassigned DNA
gttaaggattaacccttgttgcgttcgctt

SEQ ID NO: 1989 - DNA, 30 bp, Homo sapiens
  source 1..30: mol_type = unassigned DNA
ctcttggttaaggattaacccttgttgcgt

SEQ ID NO: 1990 - DNA, 30 bp, Homo sapiens
  source 1..30: mol_type = unassigned DNA
aaaagggacgtggattgctcttggttaagg

SEQ ID NO: 1991 - DNA, 30 bp, Homo sapiens
  source 1..30: mol_type = unassigned DNA
ttcaaaagggacgtggattgctcttggtta

SEQ ID NO: 1992 - DNA, 30 bp, Homo sapiens
  source 1..30: mol_type = unassigned DNA
gttcaaaagggacgtggattgctcttggtt

SEQ ID NO: 1993 - DNA, 30 bp, Homo sapiens
  source 1..30: mol_type = unassigned DNA
tcatttgttcaaaagggacgtggattgctc

SEQ ID NO: 1994 - DNA, 30 bp, Homo sapiens
  source 1..30: mol_type = unassigned DNA
ctcctaattgccctcatccctttcccccac

SEQ ID NO: 1995 - DNA, 30 bp, Homo sapiens
  source 1..30: mol_type = unassigned DNA
tgattacattttatgtaattctaatccagc

SEQ ID NO: 1996 - DNA, 30 bp, Homo sapiens
  source 1..30: mol_type = unassigned DNA
actgcatttgcaaatcatgaaaaaaacact

SEQ ID NO: 1997 - DNA, 30 bp, Homo sapiens
  source 1..30: mol_type = unassigned DNA
attacattttatgtaattctaatccagcta

SEQ ID NO: 1998 - DNA, 30 bp, Homo sapiens
  source 1..30: mol_type = unassigned DNA
gcacattaaccattagtacaagtacccaat

SEQ ID NO: 1999 - DNA, 30 bp, Homo sapiens
  source 1..30: mol_type = unassigned DNA
gagttcgcacattaaccattagtacaagta

SEQ ID NO: 2000 - DNA, 30 bp, Homo sapiens
  source 1..30: mol_type = unassigned DNA
gatgttggagttcgcacattaaccattagt

SEQ ID NO: 2001 - DNA, 30 bp, Homo sapiens
  source 1..30: mol_type = unassigned DNA
ggatgttggagttcgcacattaaccattag

SEQ ID NO: 2002 - DNA, 30 bp, Homo sapiens
  source 1..30: mol_type = unassigned DNA
tggatgttggagttcgcacattaaccatta

SEQ ID NO: 2003 - DNA, 30 bp, Homo sapiens
  source 1..30: mol_type = unassigned DNA
tattttggatgttggagttcgcacattaac

SEQ ID NO: 2004 - DNA, 30 bp, Homo sapiens
  source 1..30: mol_type = unassigned DNA
tggaataattgtattttggatgttggagtt

SEQ ID NO: 2005 - DNA, 30 bp, Homo sapiens
  source 1..30: mol_type = unassigned DNA
ttctggaataattgtattttggatgttgga

SEQ ID NO: 2006 - DNA, 30 bp, Homo sapiens
  source 1..30: mol_type = unassigned DNA
ttcttctggaataattgtattttggatgtt

SEQ ID NO: 2007 - DNA, 30 bp, Homo sapiens
  source 1..30: mol_type = unassigned DNA
gcagttattcttctggaataattgtatttt

SEQ ID NO: 2008 - DNA, 30 bp, Homo sapiens
  source 1..30: mol_type = unassigned DNA
agcagttattcttctggaataattgtattt

SEQ ID NO: 2009 - DNA, 30 bp, Homo sapiens
  source 1..30: mol_type = unassigned DNA
taaagcaacgcctgcaagagtgcccattta

SEQ ID NO: 2010 - DNA, 30 bp, Homo sapiens
  source 1..30: mol_type = unassigned DNA
caaagattgtaaagcaacgcctgcaagagt

SEQ ID NO: 2011 - DNA, 30 bp, Homo sapiens
  source 1..30: mol_type = unassigned DNA
acaaagattgtaaagcaacgcctgcaagag

SEQ ID NO: 2012 - DNA, 30 bp, Homo sapiens
  source 1..30: mol_type = unassigned DNA
tacaaagattgtaaagcaacgcctgcaaga

SEQ ID NO: 2013 - DNA, 30 bp, Homo sapiens
  source 1..30: mol_type = unassigned DNA
ttacaaagattgtaaagcaacgcctgcaag

SEQ ID NO: 2014 - DNA, 30 bp, Homo sapiens
  source 1..30: mol_type = unassigned DNA
tttacaaagattgtaaagcaacgcctgcaa

SEQ ID NO: 2015 - DNA, 30 bp, Homo sapiens
  source 1..30: mol_type = unassigned DNA
ttttacaaagattgtaaagcaacgcctgca

SEQ ID NO: 2016 - DNA, 30 bp, Homo sapiens
  source 1..30: mol_type = unassigned DNA
tttttacaaagattgtaaagcaacgcctgc

SEQ ID NO: 2017 - DNA, 30 bp, Homo sapiens
  source 1..30: mol_type = unassigned DNA
ttttttacaaagattgtaaagcaacgcctg

SEQ ID NO: 2018 - DNA, 30 bp, Homo sapiens
  source 1..30: mol_type = unassigned DNA
tttttttacaaagattgtaaagcaacgcct

SEQ ID NO: 2019 - DNA, 30 bp, Homo sapiens
  source 1..30: mol_type = unassigned DNA
ttttttttacaaagattgtaaagcaacgcc

SEQ ID NO: 2020 - DNA, 30 bp, Homo sapiens
  source 1..30: mol_type = unassigned DNA
tttttttttacaaagattgtaaagcaacgc

SEQ ID NO: 2021 - DNA, 30 bp, Homo sapiens
  source 1..30: mol_type = unassigned DNA
ttttttttttacaaagattgtaaagcaacg

SEQ ID NO: 2022 - DNA, 30 bp, Homo sapiens
  source 1..30: mol_type = unassigned DNA
cctaggactgaatgatttttttttttttac

SEQ ID NO: 2023 - DNA, 30 bp, Homo sapiens
  source 1..30: mol_type = unassigned DNA
tagggcaaaaatattgcctaggactgaatg

SEQ ID NO: 2024 - DNA, 30 bp, Homo sapiens
  source 1..30: mol_type = unassigned DNA
atagggcaaaaatattgcctaggactgaat

SEQ ID NO: 2025 - DNA, 30 bp, Homo sapiens
  source 1..30: mol_type = unassigned DNA
accattagtacaagtacccaatataacaat

SEQ ID NO: 2026 - DNA, 30 bp, Homo sapiens
  source 1..30: mol_type = unassigned DNA
tatagggcaaaaatattgcctaggactgaa

SEQ ID NO: 2027 - DNA, 30 bp, Homo sapiens
  source 1..30: mol_type = unassigned DNA
gtacaagtacccaatataacaatagatcat

SEQ ID NO: 2028 - DNA, 30 bp, Homo sapiens
  source 1..30: mol_type = unassigned DNA
agttgtatgtctttatatcaggataaagag

SEQ ID NO: 2029 - DNA, 30 bp, Homo sapiens
  source 1..30: mol_type = unassigned DNA
cttatgaaatgcagccataaagtttaactt

SEQ ID NO: 2030 - DNA, 30 bp, Homo sapiens
  source 1..30: mol_type = unassigned DNA
ccttatgaaatgcagccataaagtttaact

SEQ ID NO: 2031 - DNA, 30 bp, Homo sapiens
  source 1..30: mol_type = unassigned DNA
tccttatgaaatgcagccataaagtttaac

SEQ ID NO: 2032 - DNA, 30 bp, Homo sapiens
  source 1..30: mol_type = unassigned DNA
ttccttatgaaatgcagccataaagtttaa

SEQ ID NO: 2033 - DNA, 30 bp, Homo sapiens
  source 1..30: mol_type = unassigned DNA
tttccttatgaaatgcagccataaagttta

SEQ ID NO: 2034 - DNA, 30 bp, Homo sapiens
  source 1..30: mol_type = unassigned DNA
ttttccttatgaaatgcagccataaagttt

SEQ ID NO: 2035 - DNA, 30 bp, Homo sapiens
  source 1..30: mol_type = unassigned DNA
tttttccttatgaaatgcagccataaagtt

SEQ ID NO: 2036 - DNA, 30 bp, Homo sapiens
  source 1..30: mol_type = unassigned DNA
gaagttttttttccttatgaaatgcagcca

SEQ ID NO: 2037 - DNA, 30 bp, Homo sapiens
  source 1..30: mol_type = unassigned DNA
ggaagttttttttccttatgaaatgcagcc

SEQ ID NO: 2038 - DNA, 30 bp, Homo sapiens
  source 1..30: mol_type = unassigned DNA
tactctgtctttggaagttttttttcctta

SEQ ID NO: 2039 - DNA, 30 bp, Homo sapiens
  source 1..30: mol_type = unassigned DNA
gcattctactctgtctttggaagttttttt

SEQ ID NO: 2040 - DNA, 30 bp, Homo sapiens
  source 1..30: mol_type = unassigned DNA
ttagcattctactctgtctttggaagtttt

SEQ ID NO: 2041 - DNA, 30 bp, Homo sapiens
  source 1..30: mol_type = unassigned DNA
attagcattctactctgtctttggaagttt

SEQ ID NO: 2042 - DNA, 30 bp, Homo sapiens
  source 1..30: mol_type = unassigned DNA
tattagcattctactctgtctttggaagtt

SEQ ID NO: 2043 - DNA, 30 bp, Homo sapiens
  source 1..30: mol_type = unassigned DNA
ttattagcattctactctgtctttggaagt

SEQ ID NO: 2044 - DNA, 30 bp, Homo sapiens
  source 1..30: mol_type = unassigned DNA
aatttttattagcattctactctgtctttg

SEQ ID NO: 2045 - DNA, 30 bp, Homo sapiens
  source 1..30: mol_type = unassigned DNA
aagtgtaaattaaatttttattagcattct

SEQ ID NO: 2046 - DNA, 30 bp, Homo sapiens
  source 1..30: mol_type = unassigned DNA
caagagagcatgttaaagtgtaaattaaat

SEQ ID NO: 2047 - DNA, 30 bp, Homo sapiens
  source 1..30: mol_type = unassigned DNA
acaagagagcatgttaaagtgtaaattaaa

SEQ ID NO: 2048 - DNA, 30 bp, Homo sapiens
  source 1..30: mol_type = unassigned DNA
tacaagagagcatgttaaagtgtaaattaa

SEQ ID NO: 2049 - DNA, 30 bp, Homo sapiens
  source 1..30: mol_type = unassigned DNA
tctaaacctagtcccacaaatacttttaca

SEQ ID NO: 2050 - DNA, 30 bp, Homo sapiens
  source 1..30: mol_type = unassigned DNA
atctaaacctagtcccacaaatacttttac

SEQ ID NO: 2051 - DNA, 30 bp, Homo sapiens
  source 1..30: mol_type = unassigned DNA
agtgaaatttatctaaacctagtcccacaa

SEQ ID NO: 2052 - DNA, 30 bp, Homo sapiens
  source 1..30: mol_type = unassigned DNA
tatcaggataaagagaattgagtgaaattt

SEQ ID NO: 2053 - DNA, 30 bp, Homo sapiens
  source 1..30: mol_type = unassigned DNA
atatcaggataaagagaattgagtgaaatt

SEQ ID NO: 2054 - DNA, 30 bp, Homo sapiens
  source 1..30: mol_type = unassigned DNA
tatgtctttatatcaggataaagagaattg

SEQ ID NO: 2055 - DNA, 30 bp, Homo sapiens
  source 1..30: mol_type = unassigned DNA
gttgtatgtctttatatcaggataaagaga

SEQ ID NO: 2056 - DNA, 30 bp, Homo sapiens
  source 1..30: mol_type = unassigned DNA
tagttgtatgtctttatatcaggataaaga

SEQ ID NO: 2057 - DNA, 30 bp, Homo sapiens
  source 1..30: mol_type = unassigned DNA
ttatagggcaaaaatattgcctaggactga

SEQ ID NO: 2058 - DNA, 30 bp, Homo sapiens
  source 1..30: mol_type = unassigned DNA
tttttatagggcaaaaatattgcctaggac

SEQ ID NO: 2059 - DNA, 30 bp, Homo sapiens
  source 1..30: mol_type = unassigned DNA
atttttatagggcaaaaatattgcctagga

SEQ ID NO: 2060 - DNA, 30 bp, Homo sapiens
  source 1..30: mol_type = unassigned DNA
agccatcattttgctggtcatgtggaaata

SEQ ID NO: 2061 - DNA, 30 bp, Homo sapiens
  source 1..30: mol_type = unassigned DNA
cagccatcattttgctggtcatgtggaaat

SEQ ID NO: 2062 - DNA, 30 bp, Homo sapiens
  source 1..30: mol_type = unassigned DNA
atgcatttcagccatcattttgctggtcat

SEQ ID NO: 2063 - DNA, 30 bp, Homo sapiens
  source 1..30: mol_type = unassigned DNA
attaatgcatttcagccatcattttgctgg

SEQ ID NO: 2064 - DNA, 30 bp, Homo sapiens
  source 1..30: mol_type = unassigned DNA
tatgagtgtaaaggttaattaatgcatttc

SEQ ID NO: 2065 - DNA, 30 bp, Homo sapiens
  source 1..30: mol_type = unassigned DNA
atatgagtgtaaaggttaattaatgcattt

SEQ ID NO: 2066 - DNA, 30 bp, Homo sapiens
  source 1..30: mol_type = unassigned DNA
tatatgagtgtaaaggttaattaatgcatt

SEQ ID NO: 2067 - DNA, 30 bp, Homo sapiens
  source 1..30: mol_type = unassigned DNA
tcacaaaacacttttatatgagtgtaaagg

SEQ ID NO: 2068 - DNA, 30 bp, Homo sapiens
  source 1..30: mol_type = unassigned DNA
ttctcacaaaacacttttatatgagtgtaa

SEQ ID NO: 2069 - DNA, 30 bp, Homo sapiens
  source 1..30: mol_type = unassigned DNA
gttctcacaaaacacttttatatgagtgta

SEQ ID NO: 2070 - DNA, 30 bp, Homo sapiens
  source 1..30: mol_type = unassigned DNA
tgtacatttgttctcacaaaacacttttat

SEQ ID NO: 2071 - DNA, 30 bp, Homo sapiens
  source 1..30: mol_type = unassigned DNA
gtgtacatttgttctcacaaaacactttta

SEQ ID NO: 2072 - DNA, 30 bp, Homo sapiens
  source 1..30: mol_type = unassigned DNA
aagataacatttgtgtacatttgttctcac

SEQ ID NO: 2073 - DNA, 30 bp, Homo sapiens
  source 1..30: mol_type = unassigned DNA
gtcatgattaaagataacatttgtgtacat

SEQ ID NO: 2074 - DNA, 30 bp, Homo sapiens
  source 1..30: mol_type = unassigned DNA
ttagtcatgattaaagataacatttgtgta

SEQ ID NO: 2075 - DNA, 30 bp, Homo sapiens
  source 1..30: mol_type = unassigned DNA
attagtcatgattaaagataacatttgtgt

SEQ ID NO: 2076 - DNA, 30 bp, Homo sapiens
  source 1..30: mol_type = unassigned DNA
tattagtcatgattaaagataacatttgtg

SEQ ID NO: 2077 - DNA, 30 bp, Homo sapiens
  source 1..30: mol_type = unassigned DNA
ttattagtcatgattaaagataacatttgt

SEQ ID NO: 2078 - DNA, 30 bp, Homo sapiens
  source 1..30: mol_type = unassigned DNA
taatatccatttttattagtcatgattaaa

SEQ ID NO: 2079 - DNA, 30 bp, Homo sapiens
  source 1..30: mol_type = unassigned DNA
ataatatccatttttattagtcatgattaa

SEQ ID NO: 2080 - DNA, 30 bp, Homo sapiens
  source 1..30: mol_type = unassigned DNA
tgtttataatatccatttttattagtcatg

SEQ ID NO: 2081 - DNA, 30 bp, Homo sapiens
  source 1..30: mol_type = unassigned DNA
cagtagtaaagcttgtgtttataatatcca

SEQ ID NO: 2082 - DNA, 30 bp, Homo sapiens
  source 1..30: mol_type = unassigned DNA
gcagtagtaaagcttgtgtttataatatcc

SEQ ID NO: 2083 - DNA, 30 bp, Homo sapiens
  source 1..30: mol_type = unassigned DNA
tcaaggagacatttgcagtagtaaagcttg

SEQ ID NO: 2084 - DNA, 30 bp, Homo sapiens
  source 1..30: mol_type = unassigned DNA
gtcaaggagacatttgcagtagtaaagctt

SEQ ID NO: 2085 - DNA, 30 bp, Homo sapiens
  source 1..30: mol_type = unassigned DNA
ataaaggaatcaggccctgtcatttgtcaa

SEQ ID NO: 2086 - DNA, 30 bp, Homo sapiens
  source 1..30: mol_type = unassigned DNA
aataaaggaatcaggccctgtcatttgtca

SEQ ID NO: 2087 - DNA, 30 bp, Homo sapiens
  source 1..30: mol_type = unassigned DNA
tgctggtcatgtggaaatatagcttcttta

SEQ ID NO: 2088 - DNA, 30 bp, Homo sapiens
  source 1..30: mol_type = unassigned DNA
gctggtcatgtggaaatatagcttctttag

SEQ ID NO: 2089 - DNA, 30 bp, Homo sapiens
  source 1..30: mol_type = unassigned DNA
ctggtcatgtggaaatatagcttctttagg

SEQ ID NO: 2090 - DNA, 30 bp, Homo sapiens
  source 1..30: mol_type = unassigned DNA
tttaggaattgtacttagagtaggagccac

SEQ ID NO: 2091 - DNA, 30 bp, Homo sapiens
  source 1..30: mol_type = unassigned DNA
aaataatttatttttatagggcaaaaatat

SEQ ID NO: 2092 - DNA, 30 bp, Homo sapiens
  source 1..30: mol_type = unassigned DNA
aaaataatttatttttatagggcaaaaata

SEQ ID NO: 2093 - DNA, 30 bp, Homo sapiens
  source 1..30: mol_type = unassigned DNA
tcatagagcacatttaaaataatttatttt

SEQ ID NO: 2094 - DNA, 30 bp, Homo sapiens
  source 1..30: mol_type = unassigned DNA
cagttctcatagagcacatttaaaataatt

SEQ ID NO: 2095 - DNA, 30 bp, Homo sapiens
  source 1..30: mol_type = unassigned DNA
tggcaagaaatagataattacagttctcat

SEQ ID NO: 2096 - DNA, 30 bp, Homo sapiens
  source 1..30: mol_type = unassigned DNA
atggcaagaaatagataattacagttctca

SEQ ID NO: 2097 - DNA, 30 bp, Homo sapiens
  source 1..30: mol_type = unassigned DNA
tatggcaagaaatagataattacagttctc

SEQ ID NO: 2098 - DNA, 30 bp, Homo sapiens
  source 1..30: mol_type = unassigned DNA
ttttatggcaagaaatagataattacagtt

SEQ ID NO: 2099 - DNA, 30 bp, Homo sapiens
  source 1..30: mol_type = unassigned DNA
attttatggcaagaaatagataattacagt

SEQ ID NO: 2100 - DNA, 30 bp, Homo sapiens
  source 1..30: mol_type = unassigned DNA
aaaatttattttatggcaagaaatagataa

SEQ ID NO: 2101 - DNA, 30 bp, Homo sapiens
  source 1..30: mol_type = unassigned DNA
caaaatttattttatggcaagaaatagata

SEQ ID NO: 2102 - DNA, 30 bp, Homo sapiens
  source 1..30: mol_type = unassigned DNA
tgggtttcaaaatttattttatggcaagaa

SEQ ID NO: 2103 - DNA, 30 bp, Homo sapiens
  source 1..30: mol_type = unassigned DNA
atactctggaaagttatgggtttcaaaatt

SEQ ID NO: 2104 - DNA, 30 bp, Homo sapiens
  source 1..30: mol_type = unassigned DNA
tgaaatgcagccataaagtttaacttccat

SEQ ID NO: 2105 - DNA, 30 bp, Homo sapiens
  source 1..30: mol_type = unassigned DNA
aatactctggaaagttatgggtttcaaaat

SEQ ID NO: 2106 - DNA, 30 bp, Homo sapiens
  source 1..30: mol_type = unassigned DNA
ttgacctccagagtaaaatatttaatactc

SEQ ID NO: 2107 - DNA, 30 bp, Homo sapiens
  source 1..30: mol_type = unassigned DNA
ttgttgacctccagagtaaaatatttaata

SEQ ID NO: 2108 - DNA, 30 bp, Homo sapiens
  source 1..30: mol_type = unassigned DNA
tcacttgttgttgacctccagagtaaaata

SEQ ID NO: 2109 - DNA, 30 bp, Homo sapiens
  source 1..30: mol_type = unassigned DNA
ttctcacttgttgttgacctccagagtaaa

SEQ ID NO: 2110 - DNA, 30 bp, Homo sapiens
  source 1..30: mol_type = unassigned DNA
gttctcacttgttgttgacctccagagtaa

SEQ ID NO: 2111 - DNA, 30 bp, Homo sapiens
  source 1..30: mol_type = unassigned DNA
agtttgttctcacttgttgttgacctccag

SEQ ID NO: 2112 - DNA, 30 bp, Homo sapiens
  source 1..30: mol_type = unassigned DNA
aagtttgttctcacttgttgttgacctcca

SEQ ID NO: 2113 - DNA, 30 bp, Homo sapiens
  source 1..30: mol_type = unassigned DNA
taagtttgttctcacttgttgttgacctcc

SEQ ID NO: 2114 - DNA, 30 bp, Homo sapiens
  source 1..30: mol_type = unassigned DNA
tactataaaaccataacaaaaatattttaa

SEQ ID NO: 2115 - DNA, 30 bp, Homo sapiens
  source 1..30: mol_type = unassigned DNA
gagtaggagccacatattatactataaaac

SEQ ID NO: 2116 - DNA, 30 bp, Homo sapiens
  source 1..30: mol_type = unassigned DNA
tacttagagtaggagccacatattatacta

SEQ ID NO: 2117 - DNA, 30 bp, Homo sapiens
  source 1..30: mol_type = unassigned DNA
ggaattgtacttagagtaggagccacatat

SEQ ID NO: 2118 - DNA, 30 bp, Homo sapiens
  source 1..30: mol_type = unassigned DNA
aggaattgtacttagagtaggagccacata

SEQ ID NO: 2119 - DNA, 30 bp, Homo sapiens
  source 1..30: mol_type = unassigned DNA
acctccagagtaaaatatttaatactctgg

SEQ ID NO: 2120 - DNA, 30 bp, Homo sapiens
  source 1..30: mol_type = unassigned DNA
aacttccattaacaaagctgctcacagtaa

SEQ ID NO: 2121 - DNA, 30 bp, Homo sapiens
  source 1..30: mol_type = unassigned DNA
acttccattaacaaagctgctcacagtaaa

SEQ ID NO: 2122 - DNA, 30 bp, Homo sapiens
  source 1..30: mol_type = unassigned DNA
cattaacaaagctgctcacagtaaacctat

SEQ ID NO: 2123 - DNA, 30 bp, Homo sapiens
  source 1..30: mol_type = unassigned DNA
aaagattggtaaatttaagctcaaataatt

SEQ ID NO: 2124 - DNA, 30 bp, Homo sapiens
  source 1..30: mol_type = unassigned DNA
tttaaagattggtaaatttaagctcaaata

SEQ ID NO: 2125 - DNA, 30 bp, Homo sapiens
  source 1..30: mol_type = unassigned DNA
tcttatttaaagattggtaaatttaagctc

SEQ ID NO: 2126 - DNA, 30 bp, Homo sapiens
  source 1..30: mol_type = unassigned DNA
atataatccctctgagatgggcatactata

SEQ ID NO: 2127 - DNA, 30 bp, Homo sapiens
  source 1..30: mol_type = unassigned DNA
aatcttcatataatccctctgagatgggca

SEQ ID NO: 2128 - DNA, 30 bp, Homo sapiens
  source 1..30: mol_type = unassigned DNA
gaatcttcatataatccctctgagatgggc

SEQ ID NO: 2129 - DNA, 30 bp, Homo sapiens
  source 1..30: mol_type = unassigned DNA
tgaatcttcatataatccctctgagatggg

SEQ ID NO: 2130 - DNA, 30 bp, Homo sapiens
  source 1..30: mol_type = unassigned DNA
atccttttgaatcttcatataatccctctg

SEQ ID NO: 2131 - DNA, 30 bp, Homo sapiens
  source 1..30: mol_type = unassigned DNA
acctgcttcatccttttgaatcttcatata

SEQ ID NO: 2132 - DNA, 30 bp, Homo sapiens
  source 1..30: mol_type = unassigned DNA
gaaaacattcacctgcttcatccttttgaa

SEQ ID NO: 2133 - DNA, 30 bp, Homo sapiens
  source 1..30: mol_type = unassigned DNA
agaaaacattcacctgcttcatccttttga

SEQ ID NO: 2134 - DNA, 30 bp, Homo sapiens
  source 1..30: mol_type = unassigned DNA
tagaaaacattcacctgcttcatccttttg

SEQ ID NO: 2135 - DNA, 30 bp, Homo sapiens
  source 1..30: mol_type = unassigned DNA
ttagaaaacattcacctgcttcatcctttt

SEQ ID NO: 2136 - DNA, 30 bp, Homo sapiens
  source 1..30: mol_type = unassigned DNA
tcatttttagaaaacattcacctgcttcat

SEQ ID NO: 2137 - DNA, 30 bp, Homo sapiens
  source 1..30: mol_type = unassigned DNA
aatcgcatgatctatctatatgggaccttg

SEQ ID NO: 2138 - DNA, 30 bp, Homo sapiens
  source 1..30: mol_type = unassigned DNA
aaaagaaaaattaaatcgcatgatctatct

SEQ ID NO: 2139 - DNA, 30 bp, Homo sapiens
  source 1..30: mol_type = unassigned DNA
aaaggagcaggcaagcatagaagactaaaa

SEQ ID NO: 2140 - DNA, 30 bp, Homo sapiens
  source 1..30: mol_type = unassigned DNA
aaaaggagcaggcaagcatagaagactaaa

SEQ ID NO: 2141 - DNA, 30 bp, Homo sapiens
  source 1..30: mol_type = unassigned DNA
taaaaggagcaggcaagcatagaagactaa

SEQ ID NO: 2142 - DNA, 30 bp, Homo sapiens
  source 1..30: mol_type = unassigned DNA
ttaaaaggagcaggcaagcatagaagacta

SEQ ID NO: 2143 - DNA, 30 bp, Homo sapiens
  source 1..30: mol_type = unassigned DNA
tttaaaaggagcaggcaagcatagaagact

SEQ ID NO: 2144 - DNA, 30 bp, Homo sapiens
  source 1..30: mol_type = unassigned DNA
tatagttttttaaaaggagcaggcaagcat

SEQ ID NO: 2145 - DNA, 30 bp, Homo sapiens
  source 1..30: mol_type = unassigned DNA
ttatatagttttttaaaaggagcaggcaag

SEQ ID NO: 2146 - DNA, 30 bp, Homo sapiens
  source 1..30: mol_type = unassigned DNA
cttatatagttttttaaaaggagcaggcaa

SEQ ID NO: 2147 - DNA, 30 bp, Homo sapiens
  source 1..30: mol_type = unassigned DNA
tcttatatagttttttaaaaggagcaggca

SEQ ID NO: 2148 - DNA, 30 bp, Homo sapiens
  source 1..30: mol_type = unassigned DNA
ttcttatatagttttttaaaaggagcaggc

SEQ ID NO: 2149 - DNA, 30 bp, Homo sapiens
  source 1..30: mol_type = unassigned DNA
tttcttatatagttttttaaaaggagcagg

SEQ ID NO: 2150 - DNA, 30 bp, Homo sapiens
  source 1..30: mol_type = unassigned DNA
aagattggtaaatttaagctcaaataattt

SEQ ID NO: 2151 - DNA, 30 bp, Homo sapiens
  source 1..30: mol_type = unassigned DNA
gtaaatttaagctcaaataatttattcagt

SEQ ID NO: 2152 - DNA, 30 bp, Homo sapiens
  source 1..30: mol_type = unassigned DNA
aagctcaaataatttattcagtggcaagcc

SEQ ID NO: 2153 - DNA, 30 bp, Homo sapiens
  source 1..30: mol_type = unassigned DNA
agctcaaataatttattcagtggcaagcct

SEQ ID NO: 2154 - DNA, 30 bp, Homo sapiens
  source 1..30: mol_type = unassigned DNA
ttctgaagcctgtgccaggtattatgagaa

SEQ ID NO: 2155 - DNA, 30 bp, Homo sapiens
  source 1..30: mol_type = unassigned DNA
gattacattttatgtaattctaatccagct

SEQ ID NO: 2156 - DNA, 30 bp, Homo sapiens
  source 1..30: mol_type = unassigned DNA
gttctgaagcctgtgccaggtattatgaga

SEQ ID NO: 2157 - DNA, 30 bp, Homo sapiens
  source 1..30: mol_type = unassigned DNA
gagcaccaactttgttctgaagcctgtgcc

SEQ ID NO: 2158 - DNA, 30 bp, Homo sapiens
  source 1..30: mol_type = unassigned DNA
atagtcagtgtcactaactaaagtaaaata

SEQ ID NO: 2159 - DNA, 30 bp, Homo sapiens
  source 1..30: mol_type = unassigned DNA
aagtcattgatagtcagtgtcactaactaa

SEQ ID NO: 2160 - DNA, 30 bp, Homo sapiens
  source 1..30: mol_type = unassigned DNA
aaagtcattgatagtcagtgtcactaacta

SEQ ID NO: 2161 - DNA, 30 bp, Homo sapiens
  source 1..30: mol_type = unassigned DNA
agtttaaagtcattgatagtcagtgtcact

SEQ ID NO: 2162 - DNA, 30 bp, Homo sapiens
  source 1..30: mol_type = unassigned DNA
tcttcagtttaaagtcattgatagtcagtg

SEQ ID NO: 2163 - DNA, 30 bp, Homo sapiens
  source 1..30: mol_type = unassigned DNA
gtcttcagtttaaagtcattgatagtcagt

SEQ ID NO: 2164 - DNA, 30 bp, Homo sapiens
  source 1..30: mol_type = unassigned DNA
gcactccctccactgtcctgtaataaaaca

SEQ ID NO: 2165 - DNA, 30 bp, Homo sapiens
  source 1..30: mol_type = unassigned DNA
agcactccctccactgtcctgtaataaaac

SEQ ID NO: 2166 - DNA, 30 bp, Homo sapiens
  source 1..30: mol_type = unassigned DNA
atgcaaaataaggtttagcactccctccac

SEQ ID NO: 2167 - DNA, 30 bp, Homo sapiens
  source 1..30: mol_type = unassigned DNA
ttttcttatatagttttttaaaaggagcag

SEQ ID NO: 2168 - DNA, 30 bp, Homo sapiens
  source 1..30: mol_type = unassigned DNA
atacatatatacacattcatgcaaaataag

SEQ ID NO: 2169 - DNA, 30 bp, Homo sapiens
  source 1..30: mol_type = unassigned DNA
tatatcatgtatgtgcctatttcatacata

SEQ ID NO: 2170 - DNA, 30 bp, Homo sapiens
  source 1..30: mol_type = unassigned DNA
tatgtaatatataaatatgttatatatcat

SEQ ID NO: 2171 - DNA, 30 bp, Homo sapiens
  source 1..30: mol_type = unassigned DNA
atatgtaatatataaatatgttatatatca

SEQ ID NO: 2172 - DNA, 30 bp, Homo sapiens
  source 1..30: mol_type = unassigned DNA
cctatcaaaatatttatatgtaatatataa

SEQ ID NO: 2173 - DNA, 30 bp, Homo sapiens
  source 1..30: mol_type = unassigned DNA
acctatcaaaatatttatatgtaatatata

SEQ ID NO: 2174 - DNA, 30 bp, Homo sapiens
  source 1..30: mol_type = unassigned DNA
tttacctatcaaaatatttatatgtaatat

SEQ ID NO: 2175 - DNA, 30 bp, Homo sapiens
  source 1..30: mol_type = unassigned DNA
tgtatattatttacctatcaaaatatttat

SEQ ID NO: 2176 - DNA, 30 bp, Homo sapiens
  source 1..30: mol_type = unassigned DNA
catataataaagttgtgtatattatttacc

SEQ ID NO: 2177 - DNA, 30 bp, Homo sapiens
  source 1..30: mol_type = unassigned DNA
taacatataatatatatattacatataata

SEQ ID NO: 2178 - DNA, 30 bp, Homo sapiens
  source 1..30: mol_type = unassigned DNA
tatatatattataacatataatatatatat

SEQ ID NO: 2179 - DNA, 30 bp, Homo sapiens
  source 1..30: mol_type = unassigned DNA
agtggcaagcctcagaggcagactcggaac

SEQ ID NO: 2180 - DNA, 30 bp, Homo sapiens
  source 1..30: mol_type = unassigned DNA
ttcagtggcaagcctcagaggcagactcgg

SEQ ID NO: 2181 - DNA, 30 bp, Homo sapiens
  source 1..30: mol_type = unassigned DNA
attcagtggcaagcctcagaggcagactcg

SEQ ID NO: 2182 - DNA, 30 bp, Homo sapiens
  source 1..30: mol_type = unassigned DNA
catacatatatacacattcatgcaaaataa

SEQ ID NO: 2183 - DNA, 30 bp, Homo sapiens
  source 1..30: mol_type = unassigned DNA
taataaaggaatcaggccctgtcatttgtc

SEQ ID NO: 2184 - DNA, 30 bp, Homo sapiens
  source 1..30: mol_type = unassigned DNA
tgatgatttttttcttatatagttttttaa

SEQ ID NO: 2185 - DNA, 30 bp, Homo sapiens
  source 1..30: mol_type = unassigned DNA
tatttctgatgatttttttcttatatagtt

SEQ ID NO: 2186 - DNA, 30 bp, Homo sapiens
  source 1..30: mol_type = unassigned DNA
ttatttccaacaaaaatatctattgttatt

SEQ ID NO: 2187 - DNA, 30 bp, Homo sapiens
  source 1..30: mol_type = unassigned DNA
ctttttatttccaacaaaaatatctattgt

SEQ ID NO: 2188 - DNA, 30 bp, Homo sapiens
  source 1..30: mol_type = unassigned DNA
atgcagagttactttttatttccaacaaaa

SEQ ID NO: 2189 - DNA, 30 bp, Homo sapiens
  source 1..30: mol_type = unassigned DNA
ttaatgcagagttactttttatttccaaca

SEQ ID NO: 2190 - DNA, 30 bp, Homo sapiens
  source 1..30: mol_type = unassigned DNA
attaatgcagagttactttttatttccaac

SEQ ID NO: 2191 - DNA, 30 bp, Homo sapiens
  source 1..30: mol_type = unassigned DNA
tattaatgcagagttactttttatttccaa

SEQ ID NO: 2192 - DNA, 30 bp, Homo sapiens
  source 1..30: mol_type = unassigned DNA
ttattaatgcagagttactttttatttcca

SEQ ID NO: 2193 - DNA, 30 bp, Homo sapiens
  source 1..30: mol_type = unassigned DNA
tttttattaatgcagagttactttttattt

SEQ ID NO: 2194 - DNA, 30 bp, Homo sapiens
  source 1..30: mol_type = unassigned DNA
agaacataattatttttattaatgcagagt

SEQ ID NO: 2195 - DNA, 30 bp, Homo sapiens
  source 1..30: mol_type = unassigned DNA
cagcctccctgggaactctgcttcagaaca

SEQ ID NO: 2196 - DNA, 30 bp, Homo sapiens
  source 1..30: mol_type = unassigned DNA
ttgcagcctccctgggaactctgcttcaga

SEQ ID NO: 2197 - DNA, 30 bp, Homo sapiens
  source 1..30: mol_type = unassigned DNA
ggatagacttattgcagcctccctgggaac

SEQ ID NO: 2198 - DNA, 30 bp, Homo sapiens
  source 1..30: mol_type = unassigned DNA
aggatagacttattgcagcctccctgggaa

SEQ ID NO: 2199 - DNA, 30 bp, Homo sapiens
  source 1..30: mol_type = unassigned DNA
taggatagacttattgcagcctccctggga

SEQ ID NO: 2200 - DNA, 30 bp, Homo sapiens
  source 1..30: mol_type = unassigned DNA
atcatctcaggcacttttaggatagactta

SEQ ID NO: 2201 - DNA, 30 bp, Homo sapiens
  source 1..30: mol_type = unassigned DNA
ccagactctcgggaagaacattaatcatct

SEQ ID NO: 2202 - DNA, 30 bp, Homo sapiens
  source 1..30: mol_type = unassigned DNA
tcatttccagactctcgggaagaacattaa

SEQ ID NO: 2203 - DNA, 30 bp, Homo sapiens
  source 1..30: mol_type = unassigned DNA
caaaactgagaccagaaaatcccatcaaga

SEQ ID NO: 2204 - DNA, 30 bp, Homo sapiens
  source 1..30: mol_type = unassigned DNA
actgttacaaaactgagaccagaaaatccc

SEQ ID NO: 2205 - DNA, 30 bp, Homo sapiens
  source 1..30: mol_type = unassigned DNA
taatatattgactgttacaaaactgagacc

SEQ ID NO: 2206 - DNA, 30 bp, Homo sapiens
  source 1..30: mol_type = unassigned DNA
ctagtgaggagcaacctaactcacacgaaa

SEQ ID NO: 2207 - DNA, 30 bp, Homo sapiens
  source 1..30: mol_type = unassigned DNA
ggcttcctagtgaggagcaacctaactcac

SEQ ID NO: 2208 - DNA, 30 bp, Homo sapiens
  source 1..30: mol_type = unassigned DNA
gggcttcctagtgaggagcaacctaactca

SEQ ID NO: 2209 - DNA, 30 bp, Homo sapiens
  source 1..30: mol_type = unassigned DNA
ccagtttgggcttcctagtgaggagcaacc

SEQ ID NO: 2210 - DNA, 30 bp, Homo sapiens
  source 1..30: mol_type = unassigned DNA
cccagtttgggcttcctagtgaggagcaac

SEQ ID NO: 2211 - DNA, 30 bp, Homo sapiens
  source 1..30: mol_type = unassigned DNA
taataatagtttcccagtttgggcttccta

SEQ ID NO: 2212 - DNA, 30 bp, Homo sapiens
  source 1..30: mol_type = unassigned DNA
acaaagctgctcacagtaaacctattataa

SEQ ID NO: 2213 - DNA, 30 bp, Homo sapiens
  source 1..30: mol_type = unassigned DNA
tatttccaacaaaaatatctattgttatta

SEQ ID NO: 2214 - DNA, 30 bp, Homo sapiens
  source 1..30: mol_type = unassigned DNA
atttccaacaaaaatatctattgttattat

SEQ ID NO: 2215 - DNA, 30 bp, Homo sapiens
  source 1..30: mol_type = unassigned DNA
tttccaacaaaaatatctattgttattatt

SEQ ID NO: 2216 - DNA, 30 bp, Homo sapiens
  source 1..30: mol_type = unassigned DNA
ccaacaaaaatatctattgttattatttaa

SEQ ID NO: 2217 - DNA, 30 bp, Homo sapiens
  source 1..30: mol_type = unassigned DNA
ttatatttctgatgatttttttcttatata

SEQ ID NO: 2218 - DNA, 30 bp, Homo sapiens
  source 1..30: mol_type = unassigned DNA
attatatttctgatgatttttttcttatat

SEQ ID NO: 2219 - DNA, 30 bp, Homo sapiens
  source 1..30: mol_type = unassigned DNA
tattatatttctgatgatttttttcttata

SEQ ID NO: 2220 - DNA, 30 bp, Homo sapiens
  source 1..30: mol_type = unassigned DNA
ttattatatttctgatgatttttttcttat

SEQ ID NO: 2221 - DNA, 30 bp, Homo sapiens
  source 1..30: mol_type = unassigned DNA
tctttttattatatttctgatgattttttt

SEQ ID NO: 2222 - DNA, 30 bp, Homo sapiens
  source 1..30: mol_type = unassigned DNA
aaaattatctttttattatatttctgatga

SEQ ID NO: 2223 - DNA, 30 bp, Homo sapiens
  source 1..30: mol_type = unassigned DNA
aaaaattatctttttattatatttctgatg

SEQ ID NO: 2224 - DNA, 30 bp, Homo sapiens
  source 1..30: mol_type = unassigned DNA
tcactttaaaaattatctttttattatatt

SEQ ID NO: 2225 - DNA, 30 bp, Homo sapiens
  source 1..30: mol_type = unassigned DNA
catgatcctgcactcttgtcactttaaaaa

SEQ ID NO: 2226 - DNA, 30 bp, Homo sapiens
  source 1..30: mol_type = unassigned DNA
atgacatattacatgatcctgcactcttgt

SEQ ID NO: 2227 - DNA, 30 bp, Homo sapiens
  source 1..30: mol_type = unassigned DNA
aatgacatattacatgatcctgcactcttg

SEQ ID NO: 2228 - DNA, 30 bp, Homo sapiens
  source 1..30: mol_type = unassigned DNA
taatgacatattacatgatcctgcactctt

SEQ ID NO: 2229 - DNA, 30 bp, Homo sapiens
  source 1..30: mol_type = unassigned DNA
tagtcttttaatgacatattacatgatcct

SEQ ID NO: 2230 - DNA, 30 bp, Homo sapiens
  source 1..30: mol_type = unassigned DNA
ctgatgatttttttcttatatagtttttta

SEQ ID NO: 2231 - DNA, 30 bp, Homo sapiens
  source 1..30: mol_type = unassigned DNA
ttctagtcttttaatgacatattacatgat

SEQ ID NO: 2232 - DNA, 30 bp, Homo sapiens
  source 1..30: mol_type = unassigned DNA
aaacacatgaaaaattaccaaagttgttct

SEQ ID NO: 2233 - DNA, 30 bp, Homo sapiens
  source 1..30: mol_type = unassigned DNA
tcataataaatattcaaacacatgaaaaat

SEQ ID NO: 2234 - DNA, 30 bp, Homo sapiens
  source 1..30: mol_type = unassigned DNA
gcacccttctcataataaatattcaaacac

SEQ ID NO: 2235 - DNA, 30 bp, Homo sapiens
  source 1..30: mol_type = unassigned DNA
caattagcacccttctcataataaatattc

SEQ ID NO: 2236 - DNA, 30 bp, Homo sapiens
  source 1..30: mol_type = unassigned DNA
tctgagaaattccaattagcacccttctca

SEQ ID NO: 2237 - DNA, 30 bp, Homo sapiens
  source 1..30: mol_type = unassigned DNA
atctgagaaattccaattagcacccttctc

SEQ ID NO: 2238 - DNA, 30 bp, Homo sapiens
  source 1..30: mol_type = unassigned DNA
cagctttatctgagaaattccaattagcac

SEQ ID NO: 2239 - DNA, 30 bp, Homo sapiens
  source 1..30: mol_type = unassigned DNA
agtcttacagctttatctgagaaattccaa

SEQ ID NO: 2240 - DNA, 30 bp, Homo sapiens
  source 1..30: mol_type = unassigned DNA
aagtcttacagctttatctgagaaattcca

SEQ ID NO: 2241 - DNA, 30 bp, Homo sapiens
  source 1..30: mol_type = unassigned DNA
tttaagtcttacagctttatctgagaaatt

SEQ ID NO: 2242 - DNA, 30 bp, Homo sapiens
  source 1..30: mol_type = unassigned DNA
ttatttaagtcttacagctttatctgagaa

SEQ ID NO: 2243 - DNA, 30 bp, Homo sapiens
  source 1..30: mol_type = unassigned DNA
ttattatttaagtcttacagctttatctga

SEQ ID NO: 2244 - DNA, 30 bp, Homo sapiens
  source 1..30: mol_type = unassigned DNA
caacaaaaatatctattgttattatttaag

SEQ ID NO: 2245 - DNA, 30 bp, Homo sapiens
  source 1..30: mol_type = unassigned DNA
ccaaagttgttctagtcttttaatgacata

SEQ ID NO: 2246 - DNA, 30 bp, Homo sapiens
  source 1..30: mol_type = unassigned DNA
tcttttaataaaggaatcaggccctgtcat

SEQ ID NO: 2247 - DNA, 30 bp, Homo sapiens
  source 1..30: mol_type = unassigned DNA
cagactctcgggaagaacattaatcatctc

SEQ ID NO: 2248 - DNA, 30 bp, Homo sapiens
  source 1..30: mol_type = unassigned DNA
aattatcttttaataaaggaatcaggccct

SEQ ID NO: 2249 - DNA, 30 bp, Homo sapiens
  source 1..30: mol_type = unassigned DNA
attattcaattctaactttctaaggaagtc

SEQ ID NO: 2250 - DNA, 30 bp, Homo sapiens
  source 1..30: mol_type = unassigned DNA
tctaagccaataaaggatcttcattattca

SEQ ID NO: 2251 - DNA, 30 bp, Homo sapiens
  source 1..30: mol_type = unassigned DNA
tgcttatctaagccaataaaggatcttcat

SEQ ID NO: 2252 - DNA, 30 bp, Homo sapiens
  source 1..30: mol_type = unassigned DNA
ttctgcttatctaagccaataaaggatctt

SEQ ID NO: 2253 - DNA, 30 bp, Homo sapiens
  source 1..30: mol_type = unassigned DNA
cttctgcttatctaagccaataaaggatct

SEQ ID NO: 2254 - DNA, 30 bp, Homo sapiens
  source 1..30: mol_type = unassigned DNA
tcttctgcttatctaagccaataaaggatc

SEQ ID NO: 2255 - DNA, 30 bp, Homo sapiens
  source 1..30: mol_type = unassigned DNA
aaaagagtgttttcttctgcttatctaagc

SEQ ID NO: 2256 - DNA, 30 bp, Homo sapiens
  source 1..30: mol_type = unassigned DNA
gaaaagagtgttttcttctgcttatctaag

SEQ ID NO: 2257 - DNA, 30 bp, Homo sapiens
  source 1..30: mol_type = unassigned DNA
agtatgactgtatatttgaaaagagtgttt

SEQ ID NO: 2258 - DNA, 30 bp, Homo sapiens
  source 1..30: mol_type = unassigned DNA
ttgagtatgactgtatatttgaaaagagtg

SEQ ID NO: 2259 - DNA, 30 bp, Homo sapiens
  source 1..30: mol_type = unassigned DNA
attgagtatgactgtatatttgaaaagagt

SEQ ID NO: 2260 - DNA, 30 bp, Homo sapiens
  source 1..30: mol_type = unassigned DNA
agaatttattgagtatgactgtatatttga

SEQ ID NO: 2261 - DNA, 30 bp, Homo sapiens
  source 1..30: mol_type = unassigned DNA
ttaagaatttattgagtatgactgtatatt

SEQ ID NO: 2262 - DNA, 30 bp, Homo sapiens
  source 1..30: mol_type = unassigned DNA
ctgaataccatgtgagaaaattcttaagaa

SEQ ID NO: 2263 - DNA, 30 bp, Homo sapiens
  source 1..30: mol_type = unassigned DNA
ttcctgaataccatgtgagaaaattcttaa

SEQ ID NO: 2264 - DNA, 30 bp, Homo sapiens
  source 1..30: mol_type = unassigned DNA
cttcctgaataccatgtgagaaaattctta

SEQ ID NO: 2265 - DNA, 30 bp, Homo sapiens
  source 1..30: mol_type = unassigned DNA
taagagtatttcttcctgaataccatgtga

SEQ ID NO: 2266 - DNA, 30 bp, Homo sapiens
  source 1..30: mol_type = unassigned DNA
ttctaagagtatttcttcctgaataccatg

SEQ ID NO: 2267 - DNA, 30 bp, Homo sapiens
  source 1..30: mol_type = unassigned DNA
ccaaattattctaagagtatttcttcctga

SEQ ID NO: 2268 - DNA, 30 bp, Homo sapiens
  source 1..30: mol_type = unassigned DNA
accaaattattctaagagtatttcttcctg

SEQ ID NO: 2269 - DNA, 30 bp, Homo sapiens
  source 1..30: mol_type = unassigned DNA
tttaccaaattattctaagagtatttcttc

SEQ ID NO: 2270 - DNA, 30 bp, Homo sapiens
  source 1..30: mol_type = unassigned DNA
ttatttaccaaattattctaagagtatttc

SEQ ID NO: 2271 - DNA, 30 bp, Homo sapiens
  source 1..30: mol_type = unassigned DNA
attatttaccaaattattctaagagtattt

SEQ ID NO: 2272 - DNA, 30 bp, Homo sapiens
  source 1..30: mol_type = unassigned DNA
tatttattatttaccaaattattctaagag

SEQ ID NO: 2273 - DNA, 30 bp, Homo sapiens
  source 1..30: mol_type = unassigned DNA
ctgtctcaatatatcttatatttattattt

SEQ ID NO: 2274 - DNA, 30 bp, Homo sapiens
  source 1..30: mol_type = unassigned DNA
aaacaaaagattgctgtctcaatatatctt

SEQ ID NO: 2275 - DNA, 30 bp, Homo sapiens
  source 1..30: mol_type = unassigned DNA
tgaatagcaatactgaagaaattaaaacaa

SEQ ID NO: 2276 - DNA, 30 bp, Homo sapiens
  source 1..30: mol_type = unassigned DNA
ttcaattctaactttctaaggaagtcaacc

SEQ ID NO: 2277 - DNA, 30 bp, Homo sapiens
  source 1..30: mol_type = unassigned DNA
aattctaactttctaaggaagtcaacctac

SEQ ID NO: 2278 - DNA, 30 bp, Homo sapiens
  source 1..30: mol_type = unassigned DNA
taactttctaaggaagtcaacctacagatc

SEQ ID NO: 2279 - DNA, 30 bp, Homo sapiens
  source 1..30: mol_type = unassigned DNA
ctaaggaagtcaacctacagatcagaaaga

SEQ ID NO: 2280 - DNA, 30 bp, Homo sapiens
  source 1..30: mol_type = unassigned DNA
caatttcttgtacattgaaggaaaggaaga

SEQ ID NO: 2281 - DNA, 30 bp, Homo sapiens
  source 1..30: mol_type = unassigned DNA
gcaatttcttgtacattgaaggaaaggaag

SEQ ID NO: 2282 - DNA, 30 bp, Homo sapiens
  source 1..30: mol_type = unassigned DNA
tgcaatttcttgtacattgaaggaaaggaa

SEQ ID NO: 2283 - DNA, 30 bp, Homo sapiens
  source 1..30: mol_type = unassigned DNA
ttgcaatttcttgtacattgaaggaaagga

SEQ ID NO: 2284 - DNA, 30 bp, Homo sapiens
  source 1..30: mol_type = unassigned DNA
catttttgcaatttcttgtacattgaagga

SEQ ID NO: 2285 - DNA, 30 bp, Homo sapiens
  source 1..30: mol_type = unassigned DNA
ccatttttgcaatttcttgtacattgaagg

SEQ ID NO: 2286 - DNA, 30 bp, Homo sapiens
  source 1..30: mol_type = unassigned DNA
agggtctctcagaagctgggaaactttcca

SEQ ID NO: 2287 - DNA, 30 bp, Homo sapiens
  source 1..30: mol_type = unassigned DNA
cagggtctctcagaagctgggaaactttcc

SEQ ID NO: 2288 - DNA, 30 bp, Homo sapiens
  source 1..30: mol_type = unassigned DNA
atttcagggtctctcagaagctgggaaact

SEQ ID NO: 2289 - DNA, 30 bp, Homo sapiens
  source 1..30: mol_type = unassigned DNA
acagttcatttcagggtctctcagaagctg

SEQ ID NO: 2290 - DNA, 30 bp, Homo sapiens
  source 1..30: mol_type = unassigned DNA
ttaacagttcatttcagggtctctcagaag

SEQ ID NO: 2291 - DNA, 30 bp, Homo sapiens
  source 1..30: mol_type = unassigned DNA
ttgttaacagttcatttcagggtctctcag

SEQ ID NO: 2292 - DNA, 30 bp, Homo sapiens
  source 1..30: mol_type = unassigned DNA
agttgttgttaacagttcatttcagggtct

SEQ ID NO: 2293 - DNA, 30 bp, Homo sapiens
  source 1..30: mol_type = unassigned DNA
atgaatagcaatactgaagaaattaaaaca

SEQ ID NO: 2294 - DNA, 30 bp, Homo sapiens
  source 1..30: mol_type = unassigned DNA
gccattcagttgttgttaacagttcatttc

SEQ ID NO: 2295 - DNA, 30 bp, Homo sapiens
  source 1..30: mol_type = unassigned DNA
ctcaacacaaagttggactaagtctcaaag

SEQ ID NO: 2296 - DNA, 30 bp, Homo sapiens
  source 1..30: mol_type = unassigned DNA
cagaatatactgttactcaacacaaagttg

SEQ ID NO: 2297 - DNA, 30 bp, Homo sapiens
  source 1..30: mol_type = unassigned DNA
gcagaatatactgttactcaacacaaagtt

SEQ ID NO: 2298 - DNA, 30 bp, Homo sapiens
  source 1..30: mol_type = unassigned DNA
agggtttgcagaatatactgttactcaaca

SEQ ID NO: 2299 - DNA, 30 bp, Homo sapiens
  source 1..30: mol_type = unassigned DNA
ccaaatagggcactaaaaacatgatcccaa

SEQ ID NO: 2300 - DNA, 30 bp, Homo sapiens
  source 1..30: mol_type = unassigned DNA
cccaaatagggcactaaaaacatgatccca

SEQ ID NO: 2301 - DNA, 30 bp, Homo sapiens
  source 1..30: mol_type = unassigned DNA
aaaaatataacatttcccaaatagggcact

SEQ ID NO: 2302 - DNA, 30 bp, Homo sapiens
  source 1..30: mol_type = unassigned DNA
tgctgcaaaaatgatacaatacacgaaata

SEQ ID NO: 2303 - DNA, 30 bp, Homo sapiens
  source 1..30: mol_type = unassigned DNA
tggaaatattatgctgcaaaaatgatacaa

SEQ ID NO: 2304 - DNA, 30 bp, Homo sapiens
  source 1..30: mol_type = unassigned DNA
ctggaaatattatgctgcaaaaatgataca

SEQ ID NO: 2305 - DNA, 30 bp, Homo sapiens
  source 1..30: mol_type = unassigned DNA
ccacctttctggaaatattatgctgcaaaa

SEQ ID NO: 2306 - DNA, 30 bp, Homo sapiens
  source 1..30: mol_type = unassigned DNA
aaggaatagcatcaaagacatagtcaggtc

SEQ ID NO: 2307 - DNA, 30 bp, Homo sapiens
  source 1..30: mol_type = unassigned DNA
taaggaagtcaacctacagatcagaaagag

SEQ ID NO: 2308 - DNA, 30 bp, Homo sapiens
  source 1..30: mol_type = unassigned DNA
gactaagtctcaaagttagccattcagttg

SEQ ID NO: 2309 - DNA, 30 bp, Homo sapiens
  source 1..30: mol_type = unassigned DNA
cttgtacattgaaggaaaggaagacacact

SEQ ID NO: 2310 - DNA, 30 bp, Homo sapiens
  source 1..30: mol_type = unassigned DNA
ctatcatttatgaatagcaatactgaagaa

SEQ ID NO: 2311 - DNA, 30 bp, Homo sapiens
  source 1..30: mol_type = unassigned DNA
tggcacagttgacaaggatgataaatcaat

SEQ ID NO: 2312 - DNA, 30 bp, Homo sapiens
  source 1..30: mol_type = unassigned DNA
agggatattaacttgtaatatacaggtatc

SEQ ID NO: 2313 - DNA, 30 bp, Homo sapiens
  source 1..30: mol_type = unassigned DNA
tagggatattaacttgtaatatacaggtat

SEQ ID NO: 2314 - DNA, 30 bp, Homo sapiens
  source 1..30: mol_type = unassigned DNA
tgaccactaaacacatcagttttagggata

SEQ ID NO: 2315 - DNA, 30 bp, Homo sapiens
  source 1..30: mol_type = unassigned DNA
cgaacaagctcccagatgatgctgattctg

SEQ ID NO: 2316 - DNA, 30 bp, Homo sapiens
  source 1..30: mol_type = unassigned DNA
tgtcttccgaacaagctcccagatgatgct

SEQ ID NO: 2317 - DNA, 30 bp, Homo sapiens
  source 1..30: mol_type = unassigned DNA
aggcagacattctgtcttccgaacaagctc

SEQ ID NO: 2318 - DNA, 30 bp, Homo sapiens
  source 1..30: mol_type = unassigned DNA
aatacatctggcttgaggcagacattctgt

SEQ ID NO: 2319 - DNA, 30 bp, Homo sapiens
  source 1..30: mol_type = unassigned DNA
tgattcaatacatctggcttgaggcagaca

SEQ ID NO: 2320 - DNA, 30 bp, Homo sapiens
  source 1..30: mol_type = unassigned DNA
aaatgcaaattctgattcaatacatctggc

SEQ ID NO: 2321 - DNA, 30 bp, Homo sapiens
  source 1..30: mol_type = unassigned DNA
attaaaatgcaaattctgattcaatacatc

SEQ ID NO: 2322 - DNA, 30 bp, Homo sapiens
  source 1..30: mol_type = unassigned DNA
cattaaaatgcaaattctgattcaatacat

SEQ ID NO: 2323 - DNA, 30 bp, Homo sapiens
  source 1..30: mol_type = unassigned DNA
tcattaaaatgcaaattctgattcaataca

SEQ ID NO: 2324 - DNA, 30 bp, Homo sapiens
  source 1..30: mol_type = unassigned DNA
attttcattaaaatgcaaattctgattcaa

SEQ ID NO: 2325 - DNA, 30 bp, Homo sapiens
  source 1..30: mol_type = unassigned DNA
gattttcattaaaatgcaaattctgattca

SEQ ID NO: 2326 - DNA, 30 bp, Homo sapiens
  source 1..30: mol_type = unassigned DNA
cctttgattttcattaaaatgcaaattctg

SEQ ID NO: 2327 - DNA, 30 bp, Homo sapiens
  source 1..30: mol_type = unassigned DNA
atgtgcatatgaattacctttgattttcat

SEQ ID NO: 2328 - DNA, 30 bp, Homo sapiens
  source 1..30: mol_type = unassigned DNA
gatgtgcatatgaattacctttgattttca

SEQ ID NO: 2329 - DNA, 30 bp, Homo sapiens
  source 1..30: mol_type = unassigned DNA
ctcaaactttgatgtgcatatgaattacct

SEQ ID NO: 2330 - DNA, 30 bp, Homo sapiens
  source 1..30: mol_type = unassigned DNA
ctgtgttcctcaaactttgatgtgcatatg

SEQ ID NO: 2331 - DNA, 30 bp, Homo sapiens
  source 1..30: mol_type = unassigned DNA
atagtgtcatattactgtgttcctcaaact

SEQ ID NO: 2332 - DNA, 30 bp, Homo sapiens
  source 1..30: mol_type = unassigned DNA
aatagtgtcatattactgtgttcctcaaac

SEQ ID NO: 2333 - DNA, 30 bp, Homo sapiens
  source 1..30: mol_type = unassigned DNA
taatccagctataaaatatttaatagtgtc

SEQ ID NO: 2334 - DNA, 30 bp, Homo sapiens
  source 1..30: mol_type = unassigned DNA
tgtaattctaatccagctataaaatattta

SEQ ID NO: 2335 - DNA, 30 bp, Homo sapiens
  source 1..30: mol_type = unassigned DNA
atgtaattctaatccagctataaaatattt

SEQ ID NO: 2336 - DNA, 30 bp, Homo sapiens
  source 1..30: mol_type = unassigned DNA
attatcttttaataaaggaatcaggccctg

SEQ ID NO: 2337 - DNA, 30 bp, Homo sapiens
  source 1..30: mol_type = unassigned DNA
tatgtaattctaatccagctataaaatatt

SEQ ID NO: 2338 - DNA, 30 bp, Homo sapiens
  source 1..30: mol_type = unassigned DNA
cattttatgtaattctaatccagctataaa

SEQ ID NO: 2339 - DNA, 30 bp, Homo sapiens
  source 1..30: mol_type = unassigned DNA
gggatattaacttgtaatatacaggtatcc

SEQ ID NO: 2340 - DNA, 30 bp, Homo sapiens
  source 1..30: mol_type = unassigned DNA
acttgtaatatacaggtatccctcctggta

SEQ ID NO: 2341 - DNA, 30 bp, Homo sapiens
  source 1..30: mol_type = unassigned DNA
taatatacaggtatccctcctggtaagctc

SEQ ID NO: 2342 - DNA, 30 bp, Homo sapiens
  source 1..30: mol_type = unassigned DNA
tgtcttaacatttttaaatctatggtaatc

SEQ ID NO: 2343 - DNA, 30 bp, Homo sapiens
  source 1..30: mol_type = unassigned DNA
gctctctgtgtgagcatgtgtgcgtgtgtg

SEQ ID NO: 2344 - DNA, 30 bp, Homo sapiens
  source 1..30: mol_type = unassigned DNA
ggctctctgtgtgagcatgtgtgcgtgtgt

SEQ ID NO: 2345 - DNA, 30 bp, Homo sapiens
  source 1..30: mol_type = unassigned DNA
caggactcggcagaagaccttcgagagaaa

SEQ ID NO: 2346 - DNA, 30 bp, Homo sapiens
  source 1..30: mol_type = unassigned DNA
atattgcaggactcggcagaagaccttcga

SEQ ID NO: 2347 - DNA, 30 bp, Homo sapiens
  source 1..30: mol_type = unassigned DNA
tattcatattgcaggactcggcagaagacc

SEQ ID NO: 2348 - DNA, 30 bp, Homo sapiens
  source 1..30: mol_type = unassigned DNA
aaattatattcatattgcaggactcggcag

SEQ ID NO: 2349 - DNA, 30 bp, Homo sapiens
  source 1..30: mol_type = unassigned DNA
aaaattatattcatattgcaggactcggca

SEQ ID NO: 2350 - DNA, 30 bp, Homo sapiens
  source 1..30: mol_type = unassigned DNA
taaaattatattcatattgcaggactcggc

SEQ ID NO: 2351 - DNA, 30 bp, Homo sapiens
  source 1..30: mol_type = unassigned DNA
ttaaaattatattcatattgcaggactcgg

SEQ ID NO: 2352 - DNA, 30 bp, Homo sapiens
  source 1..30: mol_type = unassigned DNA
gatttttaaaattatattcatattgcagga

SEQ ID NO: 2353 - DNA, 30 bp, Homo sapiens
  source 1..30: mol_type = unassigned DNA
attggatttttaaaattatattcatattgc

SEQ ID NO: 2354 - DNA, 30 bp, Homo sapiens
  source 1..30: mol_type = unassigned DNA
tgccccatcactctctcttaattggatttt

SEQ ID NO: 2355 - DNA, 30 bp, Homo sapiens
  source 1..30: mol_type = unassigned DNA
tgtgttctgccccatcactctctcttaatt

SEQ ID NO: 2356 - DNA, 30 bp, Homo sapiens
  source 1..30: mol_type = unassigned DNA
acaaggatgataaatcaataatgcaagctt

SEQ ID NO: 2357 - DNA, 30 bp, Homo sapiens
  source 1..30: mol_type = unassigned DNA
ctctgggaattatgtgttctgccccatcac

SEQ ID NO: 2358 - DNA, 30 bp, Homo sapiens
  source 1..30: mol_type = unassigned DNA
attactctgggaattatgtgttctgcccca

SEQ ID NO: 2359 - DNA, 30 bp, Homo sapiens
  source 1..30: mol_type = unassigned DNA
tattactctgggaattatgtgttctgcccc

SEQ ID NO: 2360 - DNA, 30 bp, Homo sapiens
  source 1..30: mol_type = unassigned DNA
cgaactcatatacctggggattttattact

SEQ ID NO: 2361 - DNA, 30 bp, Homo sapiens
  source 1..30: mol_type = unassigned DNA
cttccgaactcatatacctggggattttat

SEQ ID NO: 2362 - DNA, 30 bp, Homo sapiens
  source 1..30: mol_type = unassigned DNA
acttccgaactcatatacctggggatttta

SEQ ID NO: 2363 - DNA, 30 bp, Homo sapiens
  source 1..30: mol_type = unassigned DNA
tacttccgaactcatatacctggggatttt

SEQ ID NO: 2364 - DNA, 30 bp, Homo sapiens
  source 1..30: mol_type = unassigned DNA
caaaatattttacttccgaactcatatacc

SEQ ID NO: 2365 - DNA, 30 bp, Homo sapiens
  source 1..30: mol_type = unassigned DNA
acaaaatattttacttccgaactcatatac

SEQ ID NO: 2366 - DNA, 30 bp, Homo sapiens
  source 1..30: mol_type = unassigned DNA
aatctatggtaatctttacaaaatatttta

SEQ ID NO: 2367 - DNA, 30 bp, Homo sapiens
  source 1..30: mol_type = unassigned DNA
aaatctatggtaatctttacaaaatatttt

SEQ ID NO: 2368 - DNA, 30 bp, Homo sapiens
  source 1..30: mol_type = unassigned DNA
taaatctatggtaatctttacaaaatattt

SEQ ID NO: 2369 - DNA, 30 bp, Homo sapiens
  source 1..30: mol_type = unassigned DNA
ttaaatctatggtaatctttacaaaatatt

SEQ ID NO: 2370 - DNA, 30 bp, Homo sapiens
  source 1..30: mol_type = unassigned DNA
acatttttaaatctatggtaatctttacaa

SEQ ID NO: 2371 - DNA, 30 bp, Homo sapiens
  source 1..30: mol_type = unassigned DNA
ttactctgggaattatgtgttctgccccat

SEQ ID NO: 2372 - DNA, 30 bp, Homo sapiens
  source 1..30: mol_type = unassigned DNA
ttgtacattgaaggaaaggaagacacactt

SEQ ID NO: 2373 - DNA, 30 bp, Homo sapiens
  source 1..30: mol_type = unassigned DNA
gagagaaaggtagaaaataagaatttggct

SEQ ID NO: 2374 - DNA, 30 bp, Homo sapiens
  source 1..30: mol_type = unassigned DNA
aaggaaaggaagacacacttaagacagcat

SEQ ID NO: 2375 - DNA, 30 bp, Homo sapiens
  source 1..30: mol_type = unassigned DNA
atctcctcagtcccatcatggttagcacat

SEQ ID NO: 2376 - DNA, 30 bp, Homo sapiens
  source 1..30: mol_type = unassigned DNA
acttaatctcctcagtcccatcatggttag

SEQ ID NO: 2377 - DNA, 30 bp, Homo sapiens
  source 1..30: mol_type = unassigned DNA
cagaaataacattgacttaatctcctcagt

SEQ ID NO: 2378 - DNA, 30 bp, Homo sapiens
  source 1..30: mol_type = unassigned DNA
tggtgggaacacactctgatgaccagttcc

SEQ ID NO: 2379 - DNA, 30 bp, Homo sapiens
  source 1..30: mol_type = unassigned DNA
ctggtgggaacacactctgatgaccagttc

SEQ ID NO: 2380 - DNA, 30 bp, Homo sapiens
  source 1..30: mol_type = unassigned DNA
tgcaggctcagcacagcatcgatttctggt

SEQ ID NO: 2381 - DNA, 30 bp, Homo sapiens
  source 1..30: mol_type = unassigned DNA
taacgtatgagacacatggcgttctgcagg

SEQ ID NO: 2382 - DNA, 30 bp, Homo sapiens
  source 1..30: mol_type = unassigned DNA
ggagaaagagagctatgaggccgtgtgggt

SEQ ID NO: 2383 - DNA, 30 bp, Homo sapiens
  source 1..30: mol_type = unassigned DNA
gggagaaagagagctatgaggccgtgtggg

SEQ ID NO: 2384 - DNA, 30 bp, Homo sapiens
  source 1..30: mol_type = unassigned DNA
ggctttgggagaaagagagctatgaggccg

SEQ ID NO: 2385 - DNA, 30 bp, Homo sapiens
  source 1..30: mol_type = unassigned DNA
aggctttgggagaaagagagctatgaggcc

SEQ ID NO: 2386 - DNA, 30 bp, Homo sapiens
  source 1..30: mol_type = unassigned DNA
ccatgatttaggctttgggagaaagagagc

SEQ ID NO: 2387 - DNA, 30 bp, Homo sapiens
  source 1..30: mol_type = unassigned DNA
aaataattgccatgatttaggctttgggag

SEQ ID NO: 2388 - DNA, 30 bp, Homo sapiens
  source 1..30: mol_type = unassigned DNA
ttcaaataattgccatgatttaggctttgg

SEQ ID NO: 2389 - DNA, 30 bp, Homo sapiens
  source 1..30: mol_type = unassigned DNA
cctggggcttattcaaataattgccatgat

SEQ ID NO: 2390 - DNA, 30 bp, Homo sapiens
  source 1..30: mol_type = unassigned DNA
atagcttacctggggcttattcaaataatt

SEQ ID NO: 2391 - DNA, 30 bp, Homo sapiens
  source 1..30: mol_type = unassigned DNA
aatagcttacctggggcttattcaaataat

SEQ ID NO: 2392 - DNA, 30 bp, Homo sapiens
  source 1..30: mol_type = unassigned DNA
taatagcttacctggggcttattcaaataa

SEQ ID NO: 2393 - DNA, 30 bp, Homo sapiens
  source 1..30: mol_type = unassigned DNA
atgcctagttttaatagcttacctggggct

SEQ ID NO: 2394 - DNA, 30 bp, Homo sapiens
  source 1..30: mol_type = unassigned DNA
caaattgatgcctagttttaatagcttacc

SEQ ID NO: 2395 - DNA, 30 bp, Homo sapiens
  source 1..30: mol_type = unassigned DNA
aagagaaaatacttccaaattgatgcctag

SEQ ID NO: 2396 - DNA, 30 bp, Homo sapiens
  source 1..30: mol_type = unassigned DNA
tgatcacagactcaccttgaagagaaaata

SEQ ID NO: 2397 - DNA, 30 bp, Homo sapiens
  source 1..30: mol_type = unassigned DNA
ctgatcacagactcaccttgaagagaaaat

SEQ ID NO: 2398 - DNA, 30 bp, Homo sapiens
  source 1..30: mol_type = unassigned DNA
tcctttctgatcacagactcaccttgaaga

SEQ ID NO: 2399 - DNA, 30 bp, Homo sapiens
  source 1..30: mol_type = unassigned DNA
aacagaccagagatggtcttctcctttctg

SEQ ID NO: 2400 - DNA, 30 bp, Homo sapiens
  source 1..30: mol_type = unassigned DNA
aaacagaccagagatggtcttctcctttct

SEQ ID NO: 2401 - DNA, 30 bp, Homo sapiens
  source 1..30: mol_type = unassigned DNA
tttaaacagaccagagatggtcttctcctt

SEQ ID NO: 2402 - DNA, 30 bp, Homo sapiens
  source 1..30: mol_type = unassigned DNA
gcacatttcaaaatgcctccttaactactt

SEQ ID NO: 2403 - DNA, 30 bp, Homo sapiens
  source 1..30: mol_type = unassigned DNA
taattatcttttaataaaggaatcaggccc

SEQ ID NO: 2404 - DNA, 30 bp, Homo sapiens
  source 1..30: mol_type = unassigned DNA
aaaatgcctccttaactacttccataggcc

SEQ ID NO: 2405 - DNA, 30 bp, Homo sapiens
  source 1..30: mol_type = unassigned DNA
actacttccataggccagagatatttagtt

SEQ ID NO: 2406 - DNA, 30 bp, Homo sapiens
  source 1..30: mol_type = unassigned DNA
ttaattatcttttaataaaggaatcaggcc

SEQ ID NO: 2407 - DNA, 30 bp, Homo sapiens
  source 1..30: mol_type = unassigned DNA
tgaaacatttttaattatcttttaataaag

SEQ ID NO: 2408 - DNA, 30 bp, Homo sapiens
  source 1..30: mol_type = unassigned DNA
tacattgaaggaaaggaagacacacttaag

SEQ ID NO: 2409 - DNA, 30 bp, Homo sapiens
  source 1..30: mol_type = unassigned DNA
aatcccttgtgaaacatttttaattatctt

SEQ ID NO: 2410 - DNA, 30 bp, Homo sapiens
  source 1..30: mol_type = unassigned DNA
gaatcccttgtgaaacatttttaattatct

SEQ ID NO: 2411 - DNA, 30 bp, Homo sapiens
  source 1..30: mol_type = unassigned DNA
tgaatcccttgtgaaacatttttaattatc

SEQ ID NO: 2412 - DNA, 30 bp, Homo sapiens
  source 1..30: mol_type = unassigned DNA
ccatcaaagcaggcaggcaggcaggagaga

SEQ ID NO: 2413 - DNA, 30 bp, Homo sapiens
  source 1..30: mol_type = unassigned DNA
atattaccatcaaagcaggcaggcaggcag

SEQ ID NO: 2414 - DNA, 30 bp, Homo sapiens
  source 1..30: mol_type = unassigned DNA
tcttcatattaccatcaaagcaggcaggca

SEQ ID NO: 2415 - DNA, 30 bp, Homo sapiens
  source 1..30: mol_type = unassigned DNA
aagattctcttcatattaccatcaaagcag

SEQ ID NO: 2416 - DNA, 30 bp, Homo sapiens
  source 1..30: mol_type = unassigned DNA
caagattctcttcatattaccatcaaagca

SEQ ID NO: 2417 - DNA, 30 bp, Homo sapiens
  source 1..30: mol_type = unassigned DNA
tttcaagattctcttcatattaccatcaaa

SEQ ID NO: 2418 - DNA, 30 bp, Homo sapiens
  source 1..30: mol_type = unassigned DNA
gatgttatttcaagattctcttcatattac

SEQ ID NO: 2419 - DNA, 30 bp, Homo sapiens
  source 1..30: mol_type = unassigned DNA
atttaaacagaccagagatggtcttctcct

SEQ ID NO: 2420 - DNA, 30 bp, Homo sapiens
  source 1..30: mol_type = unassigned DNA
atataactattagatgttatttcaagattc

SEQ ID NO: 2421 - DNA, 30 bp, Homo sapiens
  source 1..30: mol_type = unassigned DNA
acatttaatataactattagatgttatttc

SEQ ID NO: 2422 - DNA, 30 bp, Homo sapiens
  source 1..30: mol_type = unassigned DNA
cacattcacatttaatataactattagatg

SEQ ID NO: 2423 - DNA, 30 bp, Homo sapiens
  source 1..30: mol_type = unassigned DNA
acacattcacatttaatataactattagat

SEQ ID NO: 2424 - DNA, 30 bp, Homo sapiens
  source 1..30: mol_type = unassigned DNA
aataaaataaatttacacattcacatttaa

SEQ ID NO: 2425 - DNA, 30 bp, Homo sapiens
  source 1..30: mol_type = unassigned DNA
ttgaataaaataaatttacacattcacatt

SEQ ID NO: 2426 - DNA, 30 bp, Homo sapiens
  source 1..30: mol_type = unassigned DNA
gttgaataaaataaatttacacattcacat

SEQ ID NO: 2427 - DNA, 30 bp, Homo sapiens
  source 1..30: mol_type = unassigned DNA
tgttgaataaaataaatttacacattcaca

SEQ ID NO: 2428 - DNA, 30 bp, Homo sapiens
  source 1..30: mol_type = unassigned DNA
acattttgttgaataaaataaatttacaca

SEQ ID NO: 2429 - DNA, 30 bp, Homo sapiens
  source 1..30: mol_type = unassigned DNA
aacattttgttgaataaaataaatttacac

SEQ ID NO: 2430 - DNA, 30 bp, Homo sapiens
  source 1..30: mol_type = unassigned DNA
taacattttgttgaataaaataaatttaca

SEQ ID NO: 2431 - DNA, 30 bp, Homo sapiens
  source 1..30: mol_type = unassigned DNA
gttttaacattttgttgaataaaataaatt

SEQ ID NO: 2432 - DNA, 30 bp, Homo sapiens
  source 1..30: mol_type = unassigned DNA
agttttaacattttgttgaataaaataaat

SEQ ID NO: 2433 - DNA, 30 bp, Homo sapiens
  source 1..30: mol_type = unassigned DNA
cataggccagagatatttagttttaacatt

SEQ ID NO: 2434 - DNA, 30 bp, Homo sapiens
  source 1..30: mol_type = unassigned DNA
aatataactattagatgttatttcaagatt

SEQ ID NO: 2435 - DNA, 30 bp, Homo sapiens
  source 1..30: mol_type = unassigned DNA
tatttaaacagaccagagatggtcttctcc

SEQ ID NO: 2436 - DNA, 30 bp, Homo sapiens
  source 1..30: mol_type = unassigned DNA
caaaatgcctccttaactacttccataggc

SEQ ID NO: 2437 - DNA, 30 bp, Homo sapiens
  source 1..30: mol_type = unassigned DNA
gaggtgagctcccattgcagaggtcacacc

SEQ ID NO: 2438 - DNA, 30 bp, Homo sapiens
  source 1..30: mol_type = unassigned DNA
tggtgtattcataaattccagattctctat

SEQ ID NO: 2439 - DNA, 30 bp, Homo sapiens
  source 1..30: mol_type = unassigned DNA
ctggtgtattcataaattccagattctcta

SEQ ID NO: 2440 - DNA, 30 bp, Homo sapiens
  source 1..30: mol_type = unassigned DNA
tctggtgtattcataaattccagattctct

SEQ ID NO: 2441 - DNA, 30 bp, Homo sapiens
  source 1..30: mol_type = unassigned DNA
ttctggtgtattcataaattccagattctc

SEQ ID NO: 2442 - DNA, 30 bp, Homo sapiens
  source 1..30: mol_type = unassigned DNA
aactgtttttctggtgtattcataaattcc

SEQ ID NO: 2443 - DNA, 30 bp, Homo sapiens
  source 1..30: mol_type = unassigned DNA
caactgtttttctggtgtattcataaattc

SEQ ID NO: 2444 - DNA, 30 bp, Homo sapiens
  source 1..30: mol_type = unassigned DNA
tttcaactgtttttctggtgtattcataaa

SEQ ID NO: 2445 - DNA, 30 bp, Homo sapiens
  source 1..30: mol_type = unassigned DNA
ctttcaactgtttttctggtgtattcataa

SEQ ID NO: 2446 - DNA, 30 bp, Homo sapiens
  source 1..30: mol_type = unassigned DNA
ccgcaatggtgctttctttcaactgttttt

SEQ ID NO: 2447 - DNA, 30 bp, Homo sapiens
  source 1..30: mol_type = unassigned DNA
cccgcaatggtgctttctttcaactgtttt

SEQ ID NO: 2448 - DNA, 30 bp, Homo sapiens
  source 1..30: mol_type = unassigned DNA
tcccgcaatggtgctttctttcaactgttt

SEQ ID NO: 2449 - DNA, 30 bp, Homo sapiens
  source 1..30: mol_type = unassigned DNA
ctcaaacattttcccgcaatggtgctttct

SEQ ID NO: 2450 - DNA, 30 bp, Homo sapiens
  source 1..30: mol_type = unassigned DNA
tttactcaaacattttcccgcaatggtgct

SEQ ID NO: 2451 - DNA, 30 bp, Homo sapiens
  source 1..30: mol_type = unassigned DNA
ataaattccagattctctatgggaagtaac

SEQ ID NO: 2452 - DNA, 30 bp, Homo sapiens
  source 1..30: mol_type = unassigned DNA
ctttactcaaacattttcccgcaatggtgc

SEQ ID NO: 2453 - DNA, 30 bp, Homo sapiens
  source 1..30: mol_type = unassigned DNA
agggcctcgagccaataagtcttcctattt

SEQ ID NO: 2454 - DNA, 30 bp, Homo sapiens
  source 1..30: mol_type = unassigned DNA
gagatgacaaaaatctaaacttgagggcct

SEQ ID NO: 2455 - DNA, 30 bp, Homo sapiens
  source 1..30: mol_type = unassigned DNA
ggagatgacaaaaatctaaacttgagggcc

SEQ ID NO: 2456 - DNA, 30 bp, Homo sapiens
  source 1..30: mol_type = unassigned DNA
tggcagtcgggcagggctctctgtataacc

SEQ ID NO: 2457 - DNA, 30 bp, Homo sapiens
  source 1..30: mol_type = unassigned DNA
attctggcagtcgggcagggctctctgtat

SEQ ID NO: 2458 - DNA, 30 bp, Homo sapiens
  source 1..30: mol_type = unassigned DNA
aattctggcagtcgggcagggctctctgta

SEQ ID NO: 2459 - DNA, 30 bp, Homo sapiens
  source 1..30: mol_type = unassigned DNA
aatgtttaattctggcagtcgggcagggct

SEQ ID NO: 2460 - DNA, 30 bp, Homo sapiens
  source 1..30: mol_type = unassigned DNA
aaatgtttaattctggcagtcgggcagggc

SEQ ID NO: 2461 - DNA, 30 bp, Homo sapiens
  source 1..30: mol_type = unassigned DNA
taaatgtttaattctggcagtcgggcaggg

SEQ ID NO: 2462 - DNA, 30 bp, Homo sapiens
  source 1..30: mol_type = unassigned DNA
cagaggtcacacctgtgatatcaccatttt

SEQ ID NO: 2463 - DNA, 30 bp, Homo sapiens
  source 1..30: mol_type = unassigned DNA
atgttttaaatgtttaattctggcagtcgg

SEQ ID NO: 2464 - DNA, 30 bp, Homo sapiens
  source 1..30: mol_type = unassigned DNA
caaaagtaattcatgttttaaatgtttaat

SEQ ID NO: 2465 - DNA, 30 bp, Homo sapiens
  source 1..30: mol_type = unassigned DNA
agacagcattacaaaagtaattcatgtttt

SEQ ID NO: 2466 - DNA, 30 bp, Homo sapiens
  source 1..30: mol_type = unassigned DNA
ctatttctttactcaaacattttcccgcaa

SEQ ID NO: 2467 - DNA, 30 bp, Homo sapiens
  source 1..30: mol_type = unassigned DNA
cagattctctatgggaagtaacttttattg

SEQ ID NO: 2468 - DNA, 30 bp, Homo sapiens
  source 1..30: mol_type = unassigned DNA
actcaaacattttcccgcaatggtgctttc

SEQ ID NO: 2469 - DNA, 30 bp, Homo sapiens
  source 1..30: mol_type = unassigned DNA
ctcaaggtcacacagttagtcagatccaga

SEQ ID NO: 2470 - DNA, 30 bp, Homo sapiens
  source 1..30: mol_type = unassigned DNA
tctatgggaagtaacttttattgattgatt

SEQ ID NO: 2471 - DNA, 30 bp, Homo sapiens
  source 1..30: mol_type = unassigned DNA
accgattgctgctagtctcatatctgttcc

SEQ ID NO: 2472 - DNA, 30 bp, Homo sapiens
  source 1..30: mol_type = unassigned DNA
caccgattgctgctagtctcatatctgttc

SEQ ID NO: 2473 - DNA, 30 bp, Homo sapiens
  source 1..30: mol_type = unassigned DNA
ggaatccatctttcaccgattgctgctagt

SEQ ID NO: 2474 - DNA, 30 bp, Homo sapiens
  source 1..30: mol_type = unassigned DNA
ggcccaggccatctggcttcggaatccatc

SEQ ID NO: 2475 - DNA, 30 bp, Homo sapiens
  source 1..30: mol_type = unassigned DNA
gggcccaggccatctggcttcggaatccat

SEQ ID NO: 2476 - DNA, 30 bp, Homo sapiens
  source 1..30: mol_type = unassigned DNA
gtcagatccagaatttgggcccaggccatc

SEQ ID NO: 2477 - DNA, 30 bp, Homo sapiens
  source 1..30: mol_type = unassigned DNA
aagtatcttactcaaggtcacacagttagt

SEQ ID NO: 2478 - DNA, 30 bp, Homo sapiens
  source 1..30: mol_type = unassigned DNA
cagatatggaaactgaggcacagaaagttg

SEQ ID NO: 2479 - DNA, 30 bp, Homo sapiens
  source 1..30: mol_type = unassigned DNA
tattacagatatggaaactgaggcacagaa

SEQ ID NO: 2480 - DNA, 30 bp, Homo sapiens
  source 1..30: mol_type = unassigned DNA
ctgctagtctcatatctgttccatgttaga

SEQ ID NO: 2481 - DNA, 30 bp, Homo sapiens
  source 1..30: mol_type = unassigned DNA
atcacttaataatcctaagtaggttctatt

SEQ ID NO: 2482 - DNA, 30 bp, Homo sapiens
  source 1..30: mol_type = unassigned DNA
catgttagaggtgagctcccattgcagagg

SEQ ID NO: 2483 - DNA, 30 bp, Homo sapiens
  source 1..30: mol_type = unassigned DNA
ataatcctaagtaggttctattacagatat

SEQ ID NO: 2484 - DNA, 30 bp, Homo sapiens
  source 1..30: mol_type = unassigned DNA
cacatattaactgtgttaatcacttaataa

SEQ ID NO: 2485 - DNA, 30 bp, Homo sapiens
  source 1..30: mol_type = unassigned DNA
tattgattgatttaacccttgtatagcaca

SEQ ID NO: 2486 - DNA, 30 bp, Homo sapiens
  source 1..30: mol_type = unassigned DNA
attgattgatttaacccttgtatagcacat

SEQ ID NO: 2487 - DNA, 30 bp, Homo sapiens
  source 1..30: mol_type = unassigned DNA
ttgattgatttaacccttgtatagcacata

SEQ ID NO: 2488 - DNA, 30 bp, Homo sapiens
  source 1..30: mol_type = unassigned DNA
attgatttaacccttgtatagcacatataa

SEQ ID NO: 2489 - DNA, 30 bp, Homo sapiens
  source 1..30: mol_type = unassigned DNA
atttaacccttgtatagcacatataacatg

SEQ ID NO: 2490 - DNA, 30 bp, Homo sapiens
  source 1..30: mol_type = unassigned DNA
actgtgttaatcacttaataatcctaagta

SEQ ID NO: 2491 - DNA, 30 bp, Homo sapiens
  source 1..30: mol_type = unassigned DNA
aacccttgtatagcacatataacatgcaag

SEQ ID NO: 2492 - DNA, 30 bp, Homo sapiens
  source 1..30: mol_type = unassigned DNA
tatagcacatataacatgcaaggcattgtt

SEQ ID NO: 2493 - DNA, 30 bp, Homo sapiens
  source 1..30: mol_type = unassigned DNA
ttctaagaactttccacatattaactgtgt

SEQ ID NO: 2494 - DNA, 30 bp, Homo sapiens
  source 1..30: mol_type = unassigned DNA
taagaactttccacatattaactgtgttaa

SEQ ID NO: 2495 - DNA, 30 bp, Homo sapiens
  source 1..30: mol_type = unassigned DNA
ccacatattaactgtgttaatcacttaata

SEQ ID NO: 2496 - DNA, 30 bp, Homo sapiens
  source 1..30: mol_type = unassigned DNA
acccttgtatagcacatataacatgcaagg

SEQ ID NO: 2497 - RNA, 30 nt, Homo sapiens
  source 1..30: mol_type = unassigned RNA
tccgtcggctctacctggagcccacctctc

SEQ ID NO: 2498 - RNA, 30 nt, Homo sapiens
  source 1..30: mol_type = unassigned RNA
ggaagtattttctcttcaaggtgagtctgt

SEQ ID NO: 2499 - RNA, 30 nt, Homo sapiens
  source 1..30: mol_type = unassigned RNA
aaactaggcatcaatttggaagtattttct

SEQ ID NO: 2500 - RNA, 30 nt, Homo sapiens
  source 1..30: mol_type = unassigned RNA
aataagccccaggtaagctattaaaactag

SEQ ID NO: 2501 - RNA, 30 nt, Homo sapiens
  source 1..30: mol_type = unassigned RNA
gaataagccccaggtaagctattaaaacta

SEQ ID NO: 2502 - RNA, 30 nt, Homo sapiens
  source 1..30: mol_type = unassigned RNA
tttgaataagccccaggtaagctattaaaa

SEQ ID NO: 2503 - RNA, 30 nt, Homo sapiens
  source 1..30: mol_type = unassigned RNA
tcccaaagcctaaatcatggcaattatttg

SEQ ID NO: 2504 - RNA, 30 nt, Homo sapiens
  source 1..30: mol_type = unassigned RNA
ctcccaaagcctaaatcatggcaattattt

SEQ ID NO: 2505 - RNA, 30 nt, Homo sapiens
  source 1..30: mol_type = unassigned RNA
caacccacacggcctcatagctctctttct

SEQ ID NO: 2506 - RNA, 30 nt, Homo sapiens
  source 1..30: mol_type = unassigned RNA
ccaccagaaatcgatgctgtgctgagcctg

SEQ ID NO: 2507 - RNA, 30 nt, Homo sapiens
  source 1..30: mol_type = unassigned RNA
tggaactggtcatcagagtgtgttcccacc

SEQ ID NO: 2508 - RNA, 30 nt, Homo sapiens
  source 1..30: mol_type = unassigned RNA
ctggaactggtcatcagagtgtgttcccac

SEQ ID NO: 2509 - RNA, 30 nt, Homo sapiens
  source 1..30: mol_type = unassigned RNA
tttctggaactggtcatcagagtgtgttcc

SEQ ID NO: 2510 - RNA, 30 nt, Homo sapiens
  source 1..30: mol_type = unassigned RNA
agtcaatgttatttctggaactggtcatca

SEQ ID NO: 2511 - RNA, 30 nt, Homo sapiens
  source 1..30: mol_type = unassigned RNA
aaatgtgctaaccatgatgggactgaggag

SEQ ID NO: 2512 - RNA, 30 nt, Homo sapiens
  source 1..30: mol_type = unassigned RNA
gaaatgtgctaaccatgatgggactgagga

SEQ ID NO: 2513 - RNA, 30 nt, Homo sapiens
  source 1..30: mol_type = unassigned RNA
tgaaatgtgctaaccatgatgggactgagg

SEQ ID NO: 2514 - RNA, 30 nt, Homo sapiens
  source 1..30: mol_type = unassigned RNA
aggaggcattttgaaatgtgctaaccatga

SEQ ID NO: 2515 - RNA, 30 nt, Homo sapiens
  source 1..30: mol_type = unassigned RNA
aaactaaatatctctggcctatggaagtag

SEQ ID NO: 2516 - RNA, 30 nt, Homo sapiens
  source 1..30: mol_type = unassigned RNA
aacaaaatgttaaaactaaatatctctggc

SEQ ID NO: 2517 - RNA, 30 nt, Homo sapiens
  source 1..30: mol_type = unassigned RNA
ttcaacaaaatgttaaaactaaatatctct

SEQ ID NO: 2518 - RNA, 30 nt, Homo sapiens
  source 1..30: mol_type = unassigned RNA
attcaacaaaatgttaaaactaaatatctc

SEQ ID NO: 2519 - RNA, 30 nt, Homo sapiens
  source 1..30: mol_type = unassigned RNA
tattcaacaaaatgttaaaactaaatatct

SEQ ID NO: 2520 - RNA, 30 nt, Homo sapiens
  source 1..30: mol_type = unassigned RNA
ttttattcaacaaaatgttaaaactaaata

SEQ ID NO: 2521 - RNA, 30 nt, Homo sapiens
  source 1..30: mol_type = unassigned RNA
attttattcaacaaaatgttaaaactaaat

SEQ ID NO: 2522 - RNA, 30 nt, Homo sapiens
  source 1..30: mol_type = unassigned RNA
aatgtgaatgtgtaaatttattttattcaa

SEQ ID NO: 2523 - RNA, 30 nt, Homo sapiens
  source 1..30: mol_type = unassigned RNA
tattaaatgtgaatgtgtaaatttatttta

SEQ ID NO: 2524 - RNA, 30 nt, Homo sapiens
  source 1..30: mol_type = unassigned RNA
aaataacatctaatagttatattaaatgtg

SEQ ID NO: 2525 - RNA, 30 nt, Homo sapiens
  source 1..30: mol_type = unassigned RNA
gaagtattttctcttcaaggtgagtctgtg

SEQ ID NO: 2526 - RNA, 30 nt, Homo sapiens
  source 1..30: mol_type = unassigned RNA
atggtaatatgaagagaatcttgaaataac

SEQ ID NO: 2527 - RNA, 30 nt, Homo sapiens
  source 1..30: mol_type = unassigned RNA
tctcttcaaggtgagtctgtgatcagaaag

SEQ ID NO: 2528 - RNA, 30 nt, Homo sapiens
  source 1..30: mol_type = unassigned RNA
tcttcaaggtgagtctgtgatcagaaagga

SEQ ID NO: 2529 - RNA, 30 nt, Homo sapiens
  source 1..30: mol_type = unassigned RNA
cgggaaaatgtttgagtaaagaaataggaa

SEQ ID NO: 2530 - RNA, 30 nt, Homo sapiens
  source 1..30: mol_type = unassigned RNA
aaagaaagcaccattgcgggaaaatgtttg

SEQ ID NO: 2531 - RNA, 30 nt, Homo sapiens
  source 1..30: mol_type = unassigned RNA
tgaatacaccagaaaaacagttgaaagaaa

SEQ ID NO: 2532 - RNA, 30 nt, Homo sapiens
  source 1..30: mol_type = unassigned RNA
atgaatacaccagaaaaacagttgaaagaa

SEQ ID NO: 2533 - RNA, 30 nt, Homo sapiens
  source 1..30: mol_type = unassigned RNA
ccatagagaatctggaatttatgaatacac

SEQ ID NO: 2534 - RNA, 30 nt, Homo sapiens
  source 1..30: mol_type = unassigned RNA
cttcccatagagaatctggaatttatgaat

SEQ ID NO: 2535 - RNA, 30 nt, Homo sapiens
  source 1..30: mol_type = unassigned RNA
aatcaatcaataaaagttacttcccataga

SEQ ID NO: 2536 - RNA, 30 nt, Homo sapiens
  source 1..30: mol_type = unassigned RNA
tatgtgctatacaagggttaaatcaatcaa

SEQ ID NO: 2537 - RNA, 30 nt, Homo sapiens
  source 1..30: mol_type = unassigned RNA
catgttatatgtgctatacaagggttaaat

SEQ ID NO: 2538 - RNA, 30 nt, Homo sapiens
  source 1..30: mol_type = unassigned RNA
gaacaatgccttgcatgttatatgtgctat

SEQ ID NO: 2539 - RNA, 30 nt, Homo sapiens
  source 1..30: mol_type = unassigned RNA
ttagaacaatgccttgcatgttatatgtgc

SEQ ID NO: 2540 - RNA, 30 nt, Homo sapiens
  source 1..30: mol_type = unassigned RNA
atatgtggaaagttcttagaacaatgcctt

SEQ ID NO: 2541 - RNA, 30 nt, Homo sapiens
  source 1..30: mol_type = unassigned RNA
acacagttaatatgtggaaagttcttagaa

SEQ ID NO: 2542 - RNA, 30 nt, Homo sapiens
  source 1..30: mol_type = unassigned RNA
agtgattaacacagttaatatgtggaaagt

SEQ ID NO: 2543 - RNA, 30 nt, Homo sapiens
  source 1..30: mol_type = unassigned RNA
ttaagtgattaacacagttaatatgtggaa

SEQ ID NO: 2544 - RNA, 30 nt, Homo sapiens
  source 1..30: mol_type = unassigned RNA
ggattattaagtgattaacacagttaatat

SEQ ID NO: 2545 - RNA, 30 nt, Homo sapiens
  source 1..30: mol_type = unassigned RNA
catatctgtaatagaacctacttaggatta

SEQ ID NO: 2546 - RNA, 30 nt, Homo sapiens
  source 1..30: mol_type = unassigned RNA
ccatatctgtaatagaacctacttaggatt

SEQ ID NO: 2547 - RNA, 30 nt, Homo sapiens
  source 1..30: mol_type = unassigned RNA
tgtgcctcagtttccatatctgtaatagaa

SEQ ID NO: 2548 - RNA, 30 nt, Homo sapiens
  source 1..30: mol_type = unassigned RNA
ctgtgcctcagtttccatatctgtaataga

SEQ ID NO: 2549 - RNA, 30 nt, Homo sapiens
  source 1..30: mol_type = unassigned RNA
aactttctgtgcctcagtttccatatctgt

SEQ ID NO: 2550 - RNA, 30 nt, Homo sapiens
  source 1..30: mol_type = unassigned RNA
agtaagatacttcaactttctgtgcctcag

SEQ ID NO: 2551 - RNA, 30 nt, Homo sapiens
  source 1..30: mol_type = unassigned RNA
tggatctgactaactgtgtgaccttgagta

SEQ ID NO: 2552 - RNA, 30 nt, Homo sapiens
  source 1..30: mol_type = unassigned RNA
cgaagccagatggcctgggcccaaattctg

SEQ ID NO: 2553 - RNA, 30 nt, Homo sapiens
  source 1..30: mol_type = unassigned RNA
aataaaatggtgatatcacaggtgtgacct

SEQ ID NO: 2554 - RNA, 30 nt, Homo sapiens
  source 1..30: mol_type = unassigned RNA
aaataaaatggtgatatcacaggtgtgacc

SEQ ID NO: 2555 - RNA, 30 nt, Homo sapiens
  source 1..30: mol_type = unassigned RNA
aaggtgagtctgtgatcagaaaggagaaga

SEQ ID NO: 2556 - RNA, 30 nt, Homo sapiens
  source 1..30: mol_type = unassigned RNA
ctcttcaaggtgagtctgtgatcagaaagg

SEQ ID NO: 2557 - RNA, 30 nt, Homo sapiens
  source 1..30: mol_type = unassigned RNA
gatggtaatatgaagagaatcttgaaataa

SEQ ID NO: 2558 - RNA, 30 nt, Homo sapiens
  source 1..30: mol_type = unassigned RNA
tctcctgcctgcctgcctgctttgatggta

SEQ ID NO: 2559 - RNA, 30 nt, Homo sapiens
  source 1..30: mol_type = unassigned RNA
ctacagttctctcctgcctgcctgcctgct

SEQ ID NO: 2560 - RNA, 30 nt, Homo sapiens
  source 1..30: mol_type = unassigned RNA
ttgttatggttttatagtataatatgtggc

SEQ ID NO: 2561 - RNA, 30 nt, Homo sapiens
  source 1..30: mol_type = unassigned RNA
aaatatttttgttatggttttatagtataa

SEQ ID NO: 2562 - RNA, 30 nt, Homo sapiens
  source 1..30: mol_type = unassigned RNA
ctctggaggtcaacaacaagtgagaacaaa

SEQ ID NO: 2563 - RNA, 30 nt, Homo sapiens
  source 1..30: mol_type = unassigned RNA
actctggaggtcaacaacaagtgagaacaa

SEQ ID NO: 2564 - RNA, 30 nt, Homo sapiens
  source 1..30: mol_type = unassigned RNA
tactctggaggtcaacaacaagtgagaaca

SEQ ID NO: 2565 - RNA, 30 nt, Homo sapiens
  source 1..30: mol_type = unassigned RNA
aatattttactctggaggtcaacaacaagt

SEQ ID NO: 2566 - RNA, 30 nt, Homo sapiens
  source 1..30: mol_type = unassigned RNA
cagagtattaaatattttactctggaggtc

SEQ ID NO: 2567 - RNA, 30 nt, Homo sapiens
  source 1..30: mol_type = unassigned RNA
ccagagtattaaatattttactctggaggt

SEQ ID NO: 2568 - RNA, 30 nt, Homo sapiens
  source 1..30: mol_type = unassigned RNA
aaacccataactttccagagtattaaatat

SEQ ID NO: 2569 - RNA, 30 nt, Homo sapiens
  source 1..30: mol_type = unassigned RNA
gaaacccataactttccagagtattaaata

SEQ ID NO: 2570 - RNA, 30 nt, Homo sapiens
  source 1..30: mol_type = unassigned RNA
tgaaacccataactttccagagtattaaat

SEQ ID NO: 2571 - RNA, 30 nt, Homo sapiens
  source 1..30: mol_type = unassigned RNA
ccataaaataaattttgaaacccataactt

SEQ ID NO: 2572 - RNA, 30 nt, Homo sapiens
  source 1..30: mol_type = unassigned RNA
ttgccataaaataaattttgaaacccataa

SEQ ID NO: 2573 - RNA, 30 nt, Homo sapiens
  source 1..30: mol_type = unassigned RNA
cttgccataaaataaattttgaaacccata

SEQ ID NO: 2574 - RNA, 30 nt, Homo sapiens
  source 1..30: mol_type = unassigned RNA
tctatttcttgccataaaataaattttgaa

SEQ ID NO: 2575 - RNA, 30 nt, Homo sapiens
  source 1..30: mol_type = unassigned RNA
aatgtgctctatgagaactgtaattatcta

SEQ ID NO: 2576 - RNA, 30 nt, Homo sapiens
  source 1..30: mol_type = unassigned RNA
aaatgtgctctatgagaactgtaattatct

SEQ ID NO: 2577 - RNA, 30 nt, Homo sapiens
  source 1..30: mol_type = unassigned RNA
taaatgtgctctatgagaactgtaattatc

SEQ ID NO: 2578 - RNA, 30 nt, Homo sapiens
  source 1..30: mol_type = unassigned RNA
ttttaaatgtgctctatgagaactgtaatt

SEQ ID NO: 2579 - RNA, 30 nt, Homo sapiens
  source 1..30: mol_type = unassigned RNA
ccctataaaaataaattattttaaatgtgc

SEQ ID NO: 2580 - RNA, 30 nt, Homo sapiens
  source 1..30: mol_type = unassigned RNA
gccctataaaaataaattattttaaatgtg

SEQ ID NO: 2581 - RNA, 30 nt, Homo sapiens
  source 1..30: mol_type = unassigned RNA
tgccctataaaaataaattattttaaatgt

SEQ ID NO: 2582 - RNA, 30 nt, Homo sapiens
  source 1..30: mol_type = unassigned RNA
ttgccctataaaaataaattattttaaatg

SEQ ID NO: 2583 - RNA, 30 nt, Homo sapiens
  source 1..30: mol_type = unassigned RNA
agtcctaggcaatatttttgccctataaaa

SEQ ID NO: 2584 - RNA, 30 nt, Homo sapiens
  source 1..30: mol_type = unassigned RNA
taaaaaaaaaaaaatcattcagtcctaggc

SEQ ID NO: 2585 - RNA, 30 nt, Homo sapiens
  source 1..30: mol_type = unassigned RNA
gtaaaaaaaaaaaaatcattcagtcctagg

SEQ ID NO: 2586 - RNA, 30 nt, Homo sapiens
  source 1..30: mol_type = unassigned RNA
caatctttgtaaaaaaaaaaaaatcattca

SEQ ID NO: 2587 - RNA, 30 nt, Homo sapiens
  source 1..30: mol_type = unassigned RNA
tgttatggttttatagtataatatgtggct

SEQ ID NO: 2588 - RNA, 30 nt, Homo sapiens
  source 1..30: mol_type = unassigned RNA
gttatggttttatagtataatatgtggctc

SEQ ID NO: 2589 - RNA, 30 nt, Homo sapiens
  source 1..30: mol_type = unassigned RNA
ttatggttttatagtataatatgtggctcc

SEQ ID NO: 2590 - RNA, 30 nt, Homo sapiens
  source 1..30: mol_type = unassigned RNA
tggttttatagtataatatgtggctcctac

SEQ ID NO: 2591 - RNA, 30 nt, Homo sapiens
  source 1..30: mol_type = unassigned RNA
aaaaccttcctacagttctctcctgcctgc

SEQ ID NO: 2592 - RNA, 30 nt, Homo sapiens
  source 1..30: mol_type = unassigned RNA
acaagggattcaaaaccttcctacagttct

SEQ ID NO: 2593 - RNA, 30 nt, Homo sapiens
  source 1..30: mol_type = unassigned RNA
cacaagggattcaaaaccttcctacagttc

SEQ ID NO: 2594 - RNA, 30 nt, Homo sapiens
  source 1..30: mol_type = unassigned RNA
aaaatgtttcacaagggattcaaaaccttc

SEQ ID NO: 2595 - RNA, 30 nt, Homo sapiens
  source 1..30: mol_type = unassigned RNA
aaagataattaaaaatgtttcacaagggat

SEQ ID NO: 2596 - RNA, 30 nt, Homo sapiens
  source 1..30: mol_type = unassigned RNA
ttaaaagataattaaaaatgtttcacaagg

SEQ ID NO: 2597 - RNA, 30 nt, Homo sapiens
  source 1..30: mol_type = unassigned RNA
attaaaagataattaaaaatgtttcacaag

SEQ ID NO: 2598 - RNA, 30 nt, Homo sapiens
  source 1..30: mol_type = unassigned RNA
ctttattaaaagataattaaaaatgtttca

SEQ ID NO: 2599 - RNA, 30 nt, Homo sapiens
  source 1..30: mol_type = unassigned RNA
acaaatgacagggcctgattcctttattaa

SEQ ID NO: 2600 - RNA, 30 nt, Homo sapiens
  source 1..30: mol_type = unassigned RNA
ctactgcaaatgtctccttgacaaatgaca

SEQ ID NO: 2601 - RNA, 30 nt, Homo sapiens
  source 1..30: mol_type = unassigned RNA
actactgcaaatgtctccttgacaaatgac

SEQ ID NO: 2602 - RNA, 30 nt, Homo sapiens
  source 1..30: mol_type = unassigned RNA
taaacacaagctttactactgcaaatgtct

SEQ ID NO: 2603 - RNA, 30 nt, Homo sapiens
  source 1..30: mol_type = unassigned RNA
atcatgactaataaaaatggatattataaa

SEQ ID NO: 2604 - RNA, 30 nt, Homo sapiens
  source 1..30: mol_type = unassigned RNA
gagtaaagaaataggaagacttattggctc

SEQ ID NO: 2605 - RNA, 30 nt, Homo sapiens
  source 1..30: mol_type = unassigned RNA
aatcatgactaataaaaatggatattataa

SEQ ID NO: 2606 - RNA, 30 nt, Homo sapiens
  source 1..30: mol_type = unassigned RNA
tgagaacaaatgtacacaaatgttatcttt

SEQ ID NO: 2607 - RNA, 30 nt, Homo sapiens
  source 1..30: mol_type = unassigned RNA
gtgagaacaaatgtacacaaatgttatctt

SEQ ID NO: 2608 - RNA, 30 nt, Homo sapiens
  source 1..30: mol_type = unassigned RNA
tgtgagaacaaatgtacacaaatgttatct

SEQ ID NO: 2609 - RNA, 30 nt, Homo sapiens
  source 1..30: mol_type = unassigned RNA
cactcatataaaagtgttttgtgagaacaa

SEQ ID NO: 2610 - RNA, 30 nt, Homo sapiens
  source 1..30: mol_type = unassigned RNA
acactcatataaaagtgttttgtgagaaca

SEQ ID NO: 2611 - RNA, 30 nt, Homo sapiens
  source 1..30: mol_type = unassigned RNA
acctttacactcatataaaagtgttttgtg

SEQ ID NO: 2612 - RNA, 30 nt, Homo sapiens
  source 1..30: mol_type = unassigned RNA
attaacctttacactcatataaaagtgttt

SEQ ID NO: 2613 - RNA, 30 nt, Homo sapiens
  source 1..30: mol_type = unassigned RNA
cacatgaccagcaaaatgatggctgaaatg

SEQ ID NO: 2614 - RNA, 30 nt, Homo sapiens
  source 1..30: mol_type = unassigned RNA
ccacatgaccagcaaaatgatggctgaaat

SEQ ID NO: 2615 - RNA, 30 nt, Homo sapiens
  source 1..30: mol_type = unassigned RNA
ctaaagaagctatatttccacatgaccagc

SEQ ID NO: 2616 - RNA, 30 nt, Homo sapiens
  source 1..30: mol_type = unassigned RNA
tagtataatatgtggctcctactctaagta

SEQ ID NO: 2617 - RNA, 30 nt, Homo sapiens
  source 1..30: mol_type = unassigned RNA
atagtataatatgtggctcctactctaagt

SEQ ID NO: 2618 - RNA, 30 nt, Homo sapiens
  source 1..30: mol_type = unassigned RNA
tatagtataatatgtggctcctactctaag

SEQ ID NO: 2619 - RNA, 30 nt, Homo sapiens
  source 1..30: mol_type = unassigned RNA
tctttaatcatgactaataaaaatggatat

SEQ ID NO: 2620 - RNA, 30 nt, Homo sapiens
  source 1..30: mol_type = unassigned RNA
agtaaagaaataggaagacttattggctcg

SEQ ID NO: 2621 - RNA, 30 nt, Homo sapiens
  source 1..30: mol_type = unassigned RNA
ttggctcgaggccctcaagtttagattttt

SEQ ID NO: 2622 - RNA, 30 nt, Homo sapiens
  source 1..30: mol_type = unassigned RNA
gctcgaggccctcaagtttagatttttgtc

SEQ ID NO: 2623 - RNA, 30 nt, Homo sapiens
  source 1..30: mol_type = unassigned RNA
ttttaatttcttcagtattgctattcataa

SEQ ID NO: 2624 - RNA, 30 nt, Homo sapiens
  source 1..30: mol_type = unassigned RNA
gttttaatttcttcagtattgctattcata

SEQ ID NO: 2625 - RNA, 30 nt, Homo sapiens
  source 1..30: mol_type = unassigned RNA
tgttttaatttcttcagtattgctattcat

SEQ ID NO: 2626 - RNA, 30 nt, Homo sapiens
  source 1..30: mol_type = unassigned RNA
agacagcaatcttttgttttaatttcttca

SEQ ID NO: 2627 - RNA, 30 nt, Homo sapiens
  source 1..30: mol_type = unassigned RNA
gtaaataataaatataagatatattgagac

SEQ ID NO: 2628 - RNA, 30 nt, Homo sapiens
  source 1..30: mol_type = unassigned RNA
ggtaaataataaatataagatatattgaga

SEQ ID NO: 2629 - RNA, 30 nt, Homo sapiens
  source 1..30: mol_type = unassigned RNA
gaataatttggtaaataataaatataagat

SEQ ID NO: 2630 - RNA, 30 nt, Homo sapiens
  source 1..30: mol_type = unassigned RNA
aggaagaaatactcttagaataatttggta

SEQ ID NO: 2631 - RNA, 30 nt, Homo sapiens
  source 1..30: mol_type = unassigned RNA
tcacatggtattcaggaagaaatactctta

SEQ ID NO: 2632 - RNA, 30 nt, Homo sapiens
  source 1..30: mol_type = unassigned RNA
ctcacatggtattcaggaagaaatactctt

SEQ ID NO: 2633 - RNA, 30 nt, Homo sapiens
  source 1..30: mol_type = unassigned RNA
tctcacatggtattcaggaagaaatactct

SEQ ID NO: 2634 - RNA, 30 nt, Homo sapiens
  source 1..30: mol_type = unassigned RNA
agaattttctcacatggtattcaggaagaa

SEQ ID NO: 2635 - RNA, 30 nt, Homo sapiens
  source 1..30: mol_type = unassigned RNA
ttaagaattttctcacatggtattcaggaa

SEQ ID NO: 2636 - RNA, 30 nt, Homo sapiens
  source 1..30: mol_type = unassigned RNA
aaatatacagtcatactcaataaattctta

SEQ ID NO: 2637 - RNA, 30 nt, Homo sapiens
  source 1..30: mol_type = unassigned RNA
caaatatacagtcatactcaataaattctt

SEQ ID NO: 2638 - RNA, 30 nt, Homo sapiens
  source 1..30: mol_type = unassigned RNA
tcaaatatacagtcatactcaataaattct

SEQ ID NO: 2639 - RNA, 30 nt, Homo sapiens
  source 1..30: mol_type = unassigned RNA
gataagcagaagaaaacactcttttcaaat

SEQ ID NO: 2640 - RNA, 30 nt, Homo sapiens
  source 1..30: mol_type = unassigned RNA
gcttagataagcagaagaaaacactctttt

SEQ ID NO: 2641 - RNA, 30 nt, Homo sapiens
  source 1..30: mol_type = unassigned RNA
ttggcttagataagcagaagaaaacactct

SEQ ID NO: 2642 - RNA, 30 nt, Homo sapiens
  source 1..30: mol_type = unassigned RNA
attggcttagataagcagaagaaaacactc

SEQ ID NO: 2643 - RNA, 30 nt, Homo sapiens
  source 1..30: mol_type = unassigned RNA
aataatgaagatcctttattggcttagata

SEQ ID NO: 2644 - RNA, 30 nt, Homo sapiens
  source 1..30: mol_type = unassigned RNA
gaattgaataatgaagatcctttattggct

SEQ ID NO: 2645 - RNA, 30 nt, Homo sapiens
  source 1..30: mol_type = unassigned RNA
gaaagttagaattgaataatgaagatcctt

SEQ ID NO: 2646 - RNA, 30 nt, Homo sapiens
  source 1..30: mol_type = unassigned RNA
cttagaaagttagaattgaataatgaagat

SEQ ID NO: 2647 - RNA, 30 nt, Homo sapiens
  source 1..30: mol_type = unassigned RNA
acttccttagaaagttagaattgaataatg

SEQ ID NO: 2648 - RNA, 30 nt, Homo sapiens
  source 1..30: mol_type = unassigned RNA
tgatctgtaggttgacttccttagaaagtt

SEQ ID NO: 2649 - RNA, 30 nt, Homo sapiens
  source 1..30: mol_type = unassigned RNA
ctgatctgtaggttgacttccttagaaagt

SEQ ID NO: 2650 - RNA, 30 nt, Homo sapiens
  source 1..30: mol_type = unassigned RNA
taatttcttcagtattgctattcataaatg

SEQ ID NO: 2651 - RNA, 30 nt, Homo sapiens
  source 1..30: mol_type = unassigned RNA
aatttcttcagtattgctattcataaatga

SEQ ID NO: 2652 - RNA, 30 nt, Homo sapiens
  source 1..30: mol_type = unassigned RNA
atttcttcagtattgctattcataaatgat

SEQ ID NO: 2653 - RNA, 30 nt, Homo sapiens
  source 1..30: mol_type = unassigned RNA
cttcagtattgctattcataaatgatagta

SEQ ID NO: 2654 - RNA, 30 nt, Homo sapiens
  source 1..30: mol_type = unassigned RNA
agagagagtgatggggcagaacacataatt

SEQ ID NO: 2655 - RNA, 30 nt, Homo sapiens
  source 1..30: mol_type = unassigned RNA
aaaatccaattaagagagagtgatggggca

SEQ ID NO: 2656 - RNA, 30 nt, Homo sapiens
  source 1..30: mol_type = unassigned RNA
aaaaatccaattaagagagagtgatggggc

SEQ ID NO: 2657 - RNA, 30 nt, Homo sapiens
  source 1..30: mol_type = unassigned RNA
taaaaatccaattaagagagagtgatgggg

SEQ ID NO: 2658 - RNA, 30 nt, Homo sapiens
  source 1..30: mol_type = unassigned RNA
tgccgagtcctgcaatatgaatataatttt

SEQ ID NO: 2659 - RNA, 30 nt, Homo sapiens
  source 1..30: mol_type = unassigned RNA
tctcgaaggtcttctgccgagtcctgcaat

SEQ ID NO: 2660 - RNA, 30 nt, Homo sapiens
  source 1..30: mol_type = unassigned RNA
ctctcgaaggtcttctgccgagtcctgcaa

SEQ ID NO: 2661 - RNA, 30 nt, Homo sapiens
  source 1..30: mol_type = unassigned RNA
tacctttctctcgaaggtcttctgccgagt

SEQ ID NO: 2662 - RNA, 30 nt, Homo sapiens
  source 1..30: mol_type = unassigned RNA
ctacctttctctcgaaggtcttctgccgag

SEQ ID NO: 2663 - RNA, 30 nt, Homo sapiens
  source 1..30: mol_type = unassigned RNA
tctacctttctctcgaaggtcttctgccga

SEQ ID NO: 2664 - RNA, 30 nt, Homo sapiens
  source 1..30: mol_type = unassigned RNA
ttttctacctttctctcgaaggtcttctgc

SEQ ID NO: 2665 - RNA, 30 nt, Homo sapiens
  source 1..30: mol_type = unassigned RNA
ttattttctacctttctctcgaaggtcttc

SEQ ID NO: 2666 - RNA, 30 nt, Homo sapiens
  source 1..30: mol_type = unassigned RNA
ggcaggctgtctgtctctctctctcgcaca

SEQ ID NO: 2667 - RNA, 30 nt, Homo sapiens
  source 1..30: mol_type = unassigned RNA
aagatcctctttctgatctgtaggttgact

SEQ ID NO: 2668 - RNA, 30 nt, Homo sapiens
  source 1..30: mol_type = unassigned RNA
ttaggcaggctgtctgtctctctctctcgc

SEQ ID NO: 2669 - RNA, 30 nt, Homo sapiens
  source 1..30: mol_type = unassigned RNA
cttcttaggcaggctgtctgtctctctctc

SEQ ID NO: 2670 - RNA, 30 nt, Homo sapiens
  source 1..30: mol_type = unassigned RNA
atttcttcttaggcaggctgtctgtctctc

SEQ ID NO: 2671 - RNA, 30 nt, Homo sapiens
  source 1..30: mol_type = unassigned RNA
acattcatttcttcttaggcaggctgtctg

SEQ ID NO: 2672 - RNA, 30 nt, Homo sapiens
  source 1..30: mol_type = unassigned RNA
tcaactgtgccacaagccgcattcacattc

SEQ ID NO: 2673 - RNA, 30 nt, Homo sapiens
  source 1..30: mol_type = unassigned RNA
tcatccttgtcaactgtgccacaagccgca

SEQ ID NO: 2674 - RNA, 30 nt, Homo sapiens
  source 1..30: mol_type = unassigned RNA
atcatccttgtcaactgtgccacaagccgc

SEQ ID NO: 2675 - RNA, 30 nt, Homo sapiens
  source 1..30: mol_type = unassigned RNA
atttatcatccttgtcaactgtgccacaag

SEQ ID NO: 2676 - RNA, 30 nt, Homo sapiens
  source 1..30: mol_type = unassigned RNA
ttgatttatcatccttgtcaactgtgccac

SEQ ID NO: 2677 - RNA, 30 nt, Homo sapiens
  source 1..30: mol_type = unassigned RNA
cattattgatttatcatccttgtcaactgt

SEQ ID NO: 2678 - RNA, 30 nt, Homo sapiens
  source 1..30: mol_type = unassigned RNA
ataaatgatagtaagcttgcattattgatt

SEQ ID NO: 2679 - RNA, 30 nt, Homo sapiens
  source 1..30: mol_type = unassigned RNA
ctattcataaatgatagtaagcttgcatta

SEQ ID NO: 2680 - RNA, 30 nt, Homo sapiens
  source 1..30: mol_type = unassigned RNA
agtattgctattcataaatgatagtaagct

SEQ ID NO: 2681 - RNA, 30 nt, Homo sapiens
  source 1..30: mol_type = unassigned RNA
ttcagtattgctattcataaatgatagtaa

SEQ ID NO: 2682 - RNA, 30 nt, Homo sapiens
  source 1..30: mol_type = unassigned RNA
ttcttaggcaggctgtctgtctctctctct

SEQ ID NO: 2683 - RNA, 30 nt, Homo sapiens
  source 1..30: mol_type = unassigned RNA
acaatctttgtaaaaaaaaaaaaatcattc

SEQ ID NO: 2684 - RNA, 30 nt, Homo sapiens
  source 1..30: mol_type = unassigned RNA
cttgaagatcctctttctgatctgtaggtt

SEQ ID NO: 2685 - RNA, 30 nt, Homo sapiens
  source 1..30: mol_type = unassigned RNA
gatgctattccttgaagatcctctttctga

SEQ ID NO: 2686 - RNA, 30 nt, Homo sapiens
  source 1..30: mol_type = unassigned RNA
gtccaactttgtgttgagtaacagtatatt

SEQ ID NO: 2687 - RNA, 30 nt, Homo sapiens
  source 1..30: mol_type = unassigned RNA
agacttagtccaactttgtgttgagtaaca

SEQ ID NO: 2688 - RNA, 30 nt, Homo sapiens
  source 1..30: mol_type = unassigned RNA
gagacttagtccaactttgtgttgagtaac

SEQ ID NO: 2689 - RNA, 30 nt, Homo sapiens
  source 1..30: mol_type = unassigned RNA
acaacaactgaatggctaactttgagactt

SEQ ID NO: 2690 - RNA, 30 nt, Homo sapiens
  source 1..30: mol_type = unassigned RNA
tgagagaccctgaaatgaactgttaacaac

SEQ ID NO: 2691 - RNA, 30 nt, Homo sapiens
  source 1..30: mol_type = unassigned RNA
ccagcttctgagagaccctgaaatgaactg

SEQ ID NO: 2692 - RNA, 30 nt, Homo sapiens
  source 1..30: mol_type = unassigned RNA
cccagcttctgagagaccctgaaatgaact

SEQ ID NO: 2693 - RNA, 30 nt, Homo sapiens
  source 1..30: mol_type = unassigned RNA
caaaaatggaaagtttcccagcttctgaga

SEQ ID NO: 2694 - RNA, 30 nt, Homo sapiens
  source 1..30: mol_type = unassigned RNA
aatgtacaagaaattgcaaaaatggaaagt

SEQ ID NO: 2695 - RNA, 30 nt, Homo sapiens
  source 1..30: mol_type = unassigned RNA
cttcaatgtacaagaaattgcaaaaatgga

SEQ ID NO: 2696 - RNA, 30 nt, Homo sapiens
  source 1..30: mol_type = unassigned RNA
ccttcaatgtacaagaaattgcaaaaatgg

SEQ ID NO: 2697 - RNA, 30 nt, Homo sapiens
  source 1..30: mol_type = unassigned RNA
ctttccttcaatgtacaagaaattgcaaaa

SEQ ID NO: 2698 - RNA, 30 nt, Homo sapiens
  source 1..30: mol_type = unassigned RNA
agtgtgtcttcctttccttcaatgtacaag

SEQ ID NO: 2699 - RNA, 30 nt, Homo sapiens
  source 1..30: mol_type = unassigned RNA
taatgctgtcttaagtgtgtcttcctttcc

SEQ ID NO: 2700 - RNA, 30 nt, Homo sapiens
  source 1..30: mol_type = unassigned RNA
gtaatgctgtcttaagtgtgtcttcctttc

SEQ ID NO: 2701 - RNA, 30 nt, Homo sapiens
  source 1..30: mol_type = unassigned RNA
tgtaatgctgtcttaagtgtgtcttccttt

SEQ ID NO: 2702 - RNA, 30 nt, Homo sapiens
  source 1..30: mol_type = unassigned RNA
cttttgtaatgctgtcttaagtgtgtcttc

SEQ ID NO: 2703 - RNA, 30 nt, Homo sapiens
  source 1..30: mol_type = unassigned RNA
aaacatgaattacttttgtaatgctgtctt

SEQ ID NO: 2704 - RNA, 30 nt, Homo sapiens
  source 1..30: mol_type = unassigned RNA
aaaacatgaattacttttgtaatgctgtct

SEQ ID NO: 2705 - RNA, 30 nt, Homo sapiens
  source 1..30: mol_type = unassigned RNA
aacatttaaaacatgaattacttttgtaat

SEQ ID NO: 2706 - RNA, 30 nt, Homo sapiens
  source 1..30: mol_type = unassigned RNA
tacagagagccctgcccgactgccagaatt

SEQ ID NO: 2707 - RNA, 30 nt, Homo sapiens
  source 1..30: mol_type = unassigned RNA
tcatctccaaatgaggttatacagagagcc

SEQ ID NO: 2708 - RNA, 30 nt, Homo sapiens
  source 1..30: mol_type = unassigned RNA
gtcatctccaaatgaggttatacagagagc

SEQ ID NO: 2709 - RNA, 30 nt, Homo sapiens
  source 1..30: mol_type = unassigned RNA
tgtcatctccaaatgaggttatacagagag

SEQ ID NO: 2710 - RNA, 30 nt, Homo sapiens
  source 1..30: mol_type = unassigned RNA
ttgtcatctccaaatgaggttatacagaga

SEQ ID NO: 2711 - RNA, 30 nt, Homo sapiens
  source 1..30: mol_type = unassigned RNA
gatttttgtcatctccaaatgaggttatac

SEQ ID NO: 2712 - RNA, 30 nt, Homo sapiens
  source 1..30: mol_type = unassigned RNA
agatttttgtcatctccaaatgaggttata

SEQ ID NO: 2713 - RNA, 30 nt, Homo sapiens
  source 1..30: mol_type = unassigned RNA
gtgttgagtaacagtatattctgcaaaccc

SEQ ID NO: 2714 - RNA, 30 nt, Homo sapiens
  source 1..30: mol_type = unassigned RNA
tgttgagtaacagtatattctgcaaaccct

SEQ ID NO: 2715 - RNA, 30 nt, Homo sapiens
  source 1..30: mol_type = unassigned RNA
agtaacagtatattctgcaaaccctgaagc

SEQ ID NO: 2716 - RNA, 30 nt, Homo sapiens
  source 1..30: mol_type = unassigned RNA
tgcaaaccctgaagctagttttatttggga

SEQ ID NO: 2717 - RNA, 30 nt, Homo sapiens
  source 1..30: mol_type = unassigned RNA
cagaaaggtggtaatggctgcatggtcagc

SEQ ID NO: 2718 - RNA, 30 nt, Homo sapiens
  source 1..30: mol_type = unassigned RNA
ccagaaaggtggtaatggctgcatggtcag

SEQ ID NO: 2719 - RNA, 30 nt, Homo sapiens
  source 1..30: mol_type = unassigned RNA
cagcataatatttccagaaaggtggtaatg

SEQ ID NO: 2720 - RNA, 30 nt, Homo sapiens
  source 1..30: mol_type = unassigned RNA
gcagcataatatttccagaaaggtggtaat

SEQ ID NO: 2721 - RNA, 30 nt, Homo sapiens
  source 1..30: mol_type = unassigned RNA
tgcagcataatatttccagaaaggtggtaa

SEQ ID NO: 2722 - RNA, 30 nt, Homo sapiens
  source 1..30: mol_type = unassigned RNA
ttgcagcataatatttccagaaaggtggta

SEQ ID NO: 2723 - RNA, 30 nt, Homo sapiens
  source 1..30: mol_type = unassigned RNA
tatcatttttgcagcataatatttccagaa

SEQ ID NO: 2724 - RNA, 30 nt, Homo sapiens
  source 1..30: mol_type = unassigned RNA
gtgtattgtatcatttttgcagcataatat

SEQ ID NO: 2725 - RNA, 30 nt, Homo sapiens
  source 1..30: mol_type = unassigned RNA
cgtgtattgtatcatttttgcagcataata

SEQ ID NO: 2726 - RNA, 30 nt, Homo sapiens
  source 1..30: mol_type = unassigned RNA
agatatttcgtgtattgtatcatttttgca

SEQ ID NO: 2727 - RNA, 30 nt, Homo sapiens
  source 1..30: mol_type = unassigned RNA
gagatatttcgtgtattgtatcatttttgc

SEQ ID NO: 2728 - RNA, 30 nt, Homo sapiens
  source 1..30: mol_type = unassigned RNA
atttgagatatttcgtgtattgtatcattt

SEQ ID NO: 2729 - RNA, 30 nt, Homo sapiens
  source 1..30: mol_type = unassigned RNA
aatttgagatatttcgtgtattgtatcatt

SEQ ID NO: 2730 - RNA, 30 nt, Homo sapiens
  source 1..30: mol_type = unassigned RNA
atgctattccttgaagatcctctttctgat

SEQ ID NO: 2731 - RNA, 30 nt, Homo sapiens
  source 1..30: mol_type = unassigned RNA
taatttgagatatttcgtgtattgtatcat

SEQ ID NO: 2732 - RNA, 30 nt, Homo sapiens
  source 1..30: mol_type = unassigned RNA
tttaatttgagatatttcgtgtattgtatc

SEQ ID NO: 2733 - RNA, 30 nt, Homo sapiens
  source 1..30: mol_type = unassigned RNA
tattttttaatttgagatatttcgtgtatt

SEQ ID NO: 2734 - RNA, 30 nt, Homo sapiens
  source 1..30: mol_type = unassigned RNA
ggaaatgttatattttttaatttgagatat

SEQ ID NO: 2735 - RNA, 30 nt, Homo sapiens
  source 1..30: mol_type = unassigned RNA
gggaaatgttatattttttaatttgagata

SEQ ID NO: 2736 - RNA, 30 nt, Homo sapiens
  source 1..30: mol_type = unassigned RNA
gtgccctatttgggaaatgttatatttttt

SEQ ID NO: 2737 - RNA, 30 nt, Homo sapiens
  source 1..30: mol_type = unassigned RNA
agtgccctatttgggaaatgttatattttt

SEQ ID NO: 2738 - RNA, 30 nt, Homo sapiens
  source 1..30: mol_type = unassigned RNA
tagtgccctatttgggaaatgttatatttt

SEQ ID NO: 2739 - RNA, 30 nt, Homo sapiens
  source 1..30: mol_type = unassigned RNA
ttagtgccctatttgggaaatgttatattt

SEQ ID NO: 2740 - RNA, 30 nt, Homo sapiens
  source 1..30: mol_type = unassigned RNA
ggatcatgtttttagtgccctatttgggaa

SEQ ID NO: 2741 - RNA, 30 nt, Homo sapiens
  source 1..30: mol_type = unassigned RNA
gggatcatgtttttagtgccctatttggga

SEQ ID NO: 2742 - RNA, 30 nt, Homo sapiens
  source 1..30: mol_type = unassigned RNA
tttgggatcatgtttttagtgccctatttg

SEQ ID NO: 2743 - RNA, 30 nt, Homo sapiens
  source 1..30: mol_type = unassigned RNA
atttgggatcatgtttttagtgccctattt

SEQ ID NO: 2744 - RNA, 30 nt, Homo sapiens
  source 1..30: mol_type = unassigned RNA
tatttgggatcatgtttttagtgccctatt

SEQ ID NO: 2745 - RNA, 30 nt, Homo sapiens
  source 1..30: mol_type = unassigned RNA
ttaatttgagatatttcgtgtattgtatca

SEQ ID NO: 2746 - RNA, 30 nt, Homo sapiens
  source 1..30: mol_type = unassigned RNA
ccagagtaataaaatccccaggtatatgag

SEQ ID NO: 2747 - RNA, 30 nt, Homo sapiens
  source 1..30: mol_type = unassigned RNA
ctttacaatctttgtaaaaaaaaaaaaatc

SEQ ID NO: 2748 - RNA, 30 nt, Homo sapiens
  source 1..30: mol_type = unassigned RNA
cagaagaataactgctaaatgggcactctt

SEQ ID NO: 2749 - RNA, 30 nt, Homo sapiens
  source 1..30: mol_type = unassigned RNA
tatttttgttctcataatacctggcacagg

SEQ ID NO: 2750 - RNA, 30 nt, Homo sapiens
  source 1..30: mol_type = unassigned RNA
ttatttttgttctcataatacctggcacag

SEQ ID NO: 2751 - RNA, 30 nt, Homo sapiens
  source 1..30: mol_type = unassigned RNA
tgcaaaagactaaatccaccaagggtgagg

SEQ ID NO: 2752 - RNA, 30 nt, Homo sapiens
  source 1..30: mol_type = unassigned RNA
ctgcaaaagactaaatccaccaagggtgag

SEQ ID NO: 2753 - RNA, 30 nt, Homo sapiens
  source 1..30: mol_type = unassigned RNA
tctgcaaaagactaaatccaccaagggtga

SEQ ID NO: 2754 - RNA, 30 nt, Homo sapiens
  source 1..30: mol_type = unassigned RNA
ttctgcaaaagactaaatccaccaagggtg

SEQ ID NO: 2755 - RNA, 30 nt, Homo sapiens
  source 1..30: mol_type = unassigned RNA
tttctgcaaaagactaaatccaccaagggt

SEQ ID NO: 2756 - RNA, 30 nt, Homo sapiens
  source 1..30: mol_type = unassigned RNA
ttttctgcaaaagactaaatccaccaaggg

SEQ ID NO: 2757 - RNA, 30 nt, Homo sapiens
  source 1..30: mol_type = unassigned RNA
tgacatgtacaggatctttttttctgcaaa

SEQ ID NO: 2758 - RNA, 30 nt, Homo sapiens
  source 1..30: mol_type = unassigned RNA
ctgacatgtacaggatctttttttctgcaa

SEQ ID NO: 2759 - RNA, 30 nt, Homo sapiens
  source 1..30: mol_type = unassigned RNA
aactttctgacatgtacaggatcttttttt

SEQ ID NO: 2760 - RNA, 30 nt, Homo sapiens
  source 1..30: mol_type = unassigned RNA
ctattgaactttctgacatgtacaggatct

SEQ ID NO: 2761 - RNA, 30 nt, Homo sapiens
  source 1..30: mol_type = unassigned RNA
ttactattgaactttctgacatgtacagga

SEQ ID NO: 2762 - RNA, 30 nt, Homo sapiens
  source 1..30: mol_type = unassigned RNA
ccattattactattgaactttctgacatgt

SEQ ID NO: 2763 - RNA, 30 nt, Homo sapiens
  source 1..30: mol_type = unassigned RNA
taaattaccattattactattgaactttct

SEQ ID NO: 2764 - RNA, 30 nt, Homo sapiens
  source 1..30: mol_type = unassigned RNA
tagttataaattaccattattactattgaa

SEQ ID NO: 2765 - RNA, 30 nt, Homo sapiens
  source 1..30: mol_type = unassigned RNA
atagttataaattaccattattactattga

SEQ ID NO: 2766 - RNA, 30 nt, Homo sapiens
  source 1..30: mol_type = unassigned RNA
catttatagttataaattaccattattact

SEQ ID NO: 2767 - RNA, 30 nt, Homo sapiens
  source 1..30: mol_type = unassigned RNA
tgagatggtgacttccatttatagttataa

SEQ ID NO: 2768 - RNA, 30 nt, Homo sapiens
  source 1..30: mol_type = unassigned RNA
agatggtgaaattgtgagatggtgacttcc

SEQ ID NO: 2769 - RNA, 30 nt, Homo sapiens
  source 1..30: mol_type = unassigned RNA
ttaagatggtgaaattgtgagatggtgact

SEQ ID NO: 2770 - RNA, 30 nt, Homo sapiens
  source 1..30: mol_type = unassigned RNA
acaaaattgttaagatggtgaaattgtgag

SEQ ID NO: 2771 - RNA, 30 nt, Homo sapiens
  source 1..30: mol_type = unassigned RNA
aacaaaattgttaagatggtgaaattgtga

SEQ ID NO: 2772 - RNA, 30 nt, Homo sapiens
  source 1..30: mol_type = unassigned RNA
tagggcagtttaacaaaattgttaagatgg

SEQ ID NO: 2773 - RNA, 30 nt, Homo sapiens
  source 1..30: mol_type = unassigned RNA
taatattgtagggcagtttaacaaaattgt

SEQ ID NO: 2774 - RNA, 30 nt, Homo sapiens
  source 1..30: mol_type = unassigned RNA
tgtactatcttgtaatattgtagggcagtt

SEQ ID NO: 2775 - RNA, 30 nt, Homo sapiens
  source 1..30: mol_type = unassigned RNA
ctagtgtatcattatgtactatcttgtaat

SEQ ID NO: 2776 - RNA, 30 nt, Homo sapiens
  source 1..30: mol_type = unassigned RNA
atttttgttctcataatacctggcacaggc

SEQ ID NO: 2777 - RNA, 30 nt, Homo sapiens
  source 1..30: mol_type = unassigned RNA
atgttactagtgtatcattatgtactatct

SEQ ID NO: 2778 - RNA, 30 nt, Homo sapiens
  source 1..30: mol_type = unassigned RNA
tttttgttctcataatacctggcacaggct

SEQ ID NO: 2779 - RNA, 30 nt, Homo sapiens
  source 1..30: mol_type = unassigned RNA
tgttctcataatacctggcacaggcttcag

SEQ ID NO: 2780 - RNA, 30 nt, Homo sapiens
  source 1..30: mol_type = unassigned RNA
gataggtaaataatatacacaactttatta

SEQ ID NO: 2781 - RNA, 30 nt, Homo sapiens
  source 1..30: mol_type = unassigned RNA
tgataggtaaataatatacacaactttatt

SEQ ID NO: 2782 - RNA, 30 nt, Homo sapiens
  source 1..30: mol_type = unassigned RNA
catataaatattttgataggtaaataatat

SEQ ID NO: 2783 - RNA, 30 nt, Homo sapiens
  source 1..30: mol_type = unassigned RNA
tatattacatataaatattttgataggtaa

SEQ ID NO: 2784 - RNA, 30 nt, Homo sapiens
  source 1..30: mol_type = unassigned RNA
atatattacatataaatattttgataggta

SEQ ID NO: 2785 - RNA, 30 nt, Homo sapiens
  source 1..30: mol_type = unassigned RNA
catgaatgtgtatatatgtatgaaataggc

SEQ ID NO: 2786 - RNA, 30 nt, Homo sapiens
  source 1..30: mol_type = unassigned RNA
gcatgaatgtgtatatatgtatgaaatagg

SEQ ID NO: 2787 - RNA, 30 nt, Homo sapiens
  source 1..30: mol_type = unassigned RNA
tgcatgaatgtgtatatatgtatgaaatag

SEQ ID NO: 2788 - RNA, 30 nt, Homo sapiens
  source 1..30: mol_type = unassigned RNA
ttttgcatgaatgtgtatatatgtatgaaa

SEQ ID NO: 2789 - RNA, 30 nt, Homo sapiens
  source 1..30: mol_type = unassigned RNA
caggacagtggagggagtgctaaaccttat

SEQ ID NO: 2790 - RNA, 30 nt, Homo sapiens
  source 1..30: mol_type = unassigned RNA
ttacaggacagtggagggagtgctaaacct

SEQ ID NO: 2791 - RNA, 30 nt, Homo sapiens
  source 1..30: mol_type = unassigned RNA
attacaggacagtggagggagtgctaaacc

SEQ ID NO: 2792 - RNA, 30 nt, Homo sapiens
  source 1..30: mol_type = unassigned RNA
tattacaggacagtggagggagtgctaaac

SEQ ID NO: 2793 - RNA, 30 nt, Homo sapiens
  source 1..30: mol_type = unassigned RNA
tcactgtgcatgttttattacaggacagtg

SEQ ID NO: 2794 - RNA, 30 nt, Homo sapiens
  source 1..30: mol_type = unassigned RNA
aactgaagacaaatatgcctcgtgtatgac

SEQ ID NO: 2795 - RNA, 30 nt, Homo sapiens
  source 1..30: mol_type = unassigned RNA
aaactgaagacaaatatgcctcgtgtatga

SEQ ID NO: 2796 - RNA, 30 nt, Homo sapiens
  source 1..30: mol_type = unassigned RNA
gtgacactgactatcaatgactttaaactg

SEQ ID NO: 2797 - RNA, 30 nt, Homo sapiens
  source 1..30: mol_type = unassigned RNA
gttagtgacactgactatcaatgactttaa

SEQ ID NO: 2798 - RNA, 30 nt, Homo sapiens
  source 1..30: mol_type = unassigned RNA
agttagtgacactgactatcaatgacttta

SEQ ID NO: 2799 - RNA, 30 nt, Homo sapiens
  source 1..30: mol_type = unassigned RNA
ctttagttagtgacactgactatcaatgac

SEQ ID NO: 2800 - RNA, 30 nt, Homo sapiens
  source 1..30: mol_type = unassigned RNA
actttagttagtgacactgactatcaatga

SEQ ID NO: 2801 - RNA, 30 nt, Homo sapiens
  source 1..30: mol_type = unassigned RNA
tactttagttagtgacactgactatcaatg

SEQ ID NO: 2802 - RNA, 30 nt, Homo sapiens
  source 1..30: mol_type = unassigned RNA
gtgctccaatctattttactttagttagtg

SEQ ID NO: 2803 - RNA, 30 nt, Homo sapiens
  source 1..30: mol_type = unassigned RNA
agaacaaagttggtgctccaatctatttta

SEQ ID NO: 2804 - RNA, 30 nt, Homo sapiens
  source 1..30: mol_type = unassigned RNA
tcataatacctggcacaggcttcagaacaa

SEQ ID NO: 2805 - RNA, 30 nt, Homo sapiens
  source 1..30: mol_type = unassigned RNA
ttctcataatacctggcacaggcttcagaa

SEQ ID NO: 2806 - RNA, 30 nt, Homo sapiens
  source 1..30: mol_type = unassigned RNA
gttctcataatacctggcacaggcttcaga

SEQ ID NO: 2807 - RNA, 30 nt, Homo sapiens
  source 1..30: mol_type = unassigned RNA
ttgttctcataatacctggcacaggcttca

SEQ ID NO: 2808 - RNA, 30 nt, Homo sapiens
  source 1..30: mol_type = unassigned RNA
ctagttgatgttactagtgtatcattatgt

SEQ ID NO: 2809 - RNA, 30 nt, Homo sapiens
  source 1..30: mol_type = unassigned RNA
gtacttcctagttgatgttactagtgtatc

SEQ ID NO: 2810 - RNA, 30 nt, Homo sapiens
  source 1..30: mol_type = unassigned RNA
gtggatcttggtacttcctagttgatgtta

SEQ ID NO: 2811 - RNA, 30 nt, Homo sapiens
  source 1..30: mol_type = unassigned RNA
actgagaatcagcagcgtttgaggagctag

SEQ ID NO: 2812 - RNA, 30 nt, Homo sapiens
  source 1..30: mol_type = unassigned RNA
tactgagaatcagcagcgtttgaggagcta

SEQ ID NO: 2813 - RNA, 30 nt, Homo sapiens
  source 1..30: mol_type = unassigned RNA
ccaaattttactgagaatcagcagcgtttg

SEQ ID NO: 2814 - RNA, 30 nt, Homo sapiens
  source 1..30: mol_type = unassigned RNA
aaatgcttcccaaattttactgagaatcag

SEQ ID NO: 2815 - RNA, 30 nt, Homo sapiens
  source 1..30: mol_type = unassigned RNA
attaaaatgcttcccaaattttactgagaa

SEQ ID NO: 2816 - RNA, 30 nt, Homo sapiens
  source 1..30: mol_type = unassigned RNA
aattaaaatgcttcccaaattttactgaga

SEQ ID NO: 2817 - RNA, 30 nt, Homo sapiens
  source 1..30: mol_type = unassigned RNA
tttaattaaaatgcttcccaaattttactg

SEQ ID NO: 2818 - RNA, 30 nt, Homo sapiens
  source 1..30: mol_type = unassigned RNA
atgagtccatcaaccaatctggccagagaa

SEQ ID NO: 2819 - RNA, 30 nt, Homo sapiens
  source 1..30: mol_type = unassigned RNA
aatgagtccatcaaccaatctggccagaga

SEQ ID NO: 2820 - RNA, 30 nt, Homo sapiens
  source 1..30: mol_type = unassigned RNA
aatatttaatgagtccatcaaccaatctgg

SEQ ID NO: 2821 - RNA, 30 nt, Homo sapiens
  source 1..30: mol_type = unassigned RNA
aaatatttaatgagtccatcaaccaatctg

SEQ ID NO: 2822 - RNA, 30 nt, Homo sapiens
  source 1..30: mol_type = unassigned RNA
caagatagtacataatgatacactagtaac

SEQ ID NO: 2823 - RNA, 30 nt, Homo sapiens
  source 1..30: mol_type = unassigned RNA
aactgccctacaatattacaagatagtaca

SEQ ID NO: 2824 - RNA, 30 nt, Homo sapiens
  source 1..30: mol_type = unassigned RNA
ttaaactgccctacaatattacaagatagt

SEQ ID NO: 2825 - RNA, 30 nt, Homo sapiens
  source 1..30: mol_type = unassigned RNA
gttaaactgccctacaatattacaagatag

SEQ ID NO: 2826 - RNA, 30 nt, Homo sapiens
  source 1..30: mol_type = unassigned RNA
tgttaaactgccctacaatattacaagata

SEQ ID NO: 2827 - RNA, 30 nt, Homo sapiens
  source 1..30: mol_type = unassigned RNA
acaattttgttaaactgccctacaatatta

SEQ ID NO: 2828 - RNA, 30 nt, Homo sapiens
  source 1..30: mol_type = unassigned RNA
accatcttaacaattttgttaaactgccct

SEQ ID NO: 2829 - RNA, 30 nt, Homo sapiens
  source 1..30: mol_type = unassigned RNA
caccatcttaacaattttgttaaactgccc

SEQ ID NO: 2830 - RNA, 30 nt, Homo sapiens
  source 1..30: mol_type = unassigned RNA
taactataaatggaagtcaccatctcacaa

SEQ ID NO: 2831 - RNA, 30 nt, Homo sapiens
  source 1..30: mol_type = unassigned RNA
ataactataaatggaagtcaccatctcaca

SEQ ID NO: 2832 - RNA, 30 nt, Homo sapiens
  source 1..30: mol_type = unassigned RNA
aatagtaataatggtaatttataactataa

SEQ ID NO: 2833 - RNA, 30 nt, Homo sapiens
  source 1..30: mol_type = unassigned RNA
cagaaaaaaagatcctgtacatgtcagaaa

SEQ ID NO: 2834 - RNA, 30 nt, Homo sapiens
  source 1..30: mol_type = unassigned RNA
gcagaaaaaaagatcctgtacatgtcagaa

SEQ ID NO: 2835 - RNA, 30 nt, Homo sapiens
  source 1..30: mol_type = unassigned RNA
tgcagaaaaaaagatcctgtacatgtcaga

SEQ ID NO: 2836 - RNA, 30 nt, Homo sapiens
  source 1..30: mol_type = unassigned RNA
gtcttttgcagaaaaaaagatcctgtacat

SEQ ID NO: 2837 - RNA, 30 nt, Homo sapiens
  source 1..30: mol_type = unassigned RNA
agtcttttgcagaaaaaaagatcctgtaca

SEQ ID NO: 2838 - RNA, 30 nt, Homo sapiens
  source 1..30: mol_type = unassigned RNA
ctgagaatcagcagcgtttgaggagctagc

SEQ ID NO: 2839 - RNA, 30 nt, Homo sapiens
  source 1..30: mol_type = unassigned RNA
gaggagctagcctccacccccagaggttct

SEQ ID NO: 2840 - RNA, 30 nt, Homo sapiens
  source 1..30: mol_type = unassigned RNA
aggagctagcctccacccccagaggttctc

SEQ ID NO: 2841 - RNA, 30 nt, Homo sapiens
  source 1..30: mol_type = unassigned RNA
tcactctattaggtctgaagcaggtcccat

SEQ ID NO: 2842 - RNA, 30 nt, Homo sapiens
  source 1..30: mol_type = unassigned RNA
ggtggatcttggtacttcctagttgatgtt

SEQ ID NO: 2843 - RNA, 30 nt, Homo sapiens
  source 1..30: mol_type = unassigned RNA
tggtggatcttggtacttcctagttgatgt

SEQ ID NO: 2844 - RNA, 30 nt, Homo sapiens
  source 1..30: mol_type = unassigned RNA
agccttttggtggatcttggtacttcctag

SEQ ID NO: 2845 - RNA, 30 nt, Homo sapiens
  source 1..30: mol_type = unassigned RNA
cagccttttggtggatcttggtacttccta

SEQ ID NO: 2846 - RNA, 30 nt, Homo sapiens
  source 1..30: mol_type = unassigned RNA
tcagccttttggtggatcttggtacttcct

SEQ ID NO: 2847 - RNA, 30 nt, Homo sapiens
  source 1..30: mol_type = unassigned RNA
ttcagccttttggtggatcttggtacttcc

SEQ ID NO: 2848 - RNA, 30 nt, Homo sapiens
  source 1..30: mol_type = unassigned RNA
aatttttcagccttttggtggatcttggta

SEQ ID NO: 2849 - RNA, 30 nt, Homo sapiens
  source 1..30: mol_type = unassigned RNA
aaatttttcagccttttggtggatcttggt

SEQ ID NO: 2850 - RNA, 30 nt, Homo sapiens
  source 1..30: mol_type = unassigned RNA
aatatttaaatttttcagccttttggtgga

SEQ ID NO: 2851 - RNA, 30 nt, Homo sapiens
  source 1..30: mol_type = unassigned RNA
atggactcattaaatatttaaatttttcag

SEQ ID NO: 2852 - RNA, 30 nt, Homo sapiens
  source 1..30: mol_type = unassigned RNA
gttgatggactcattaaatatttaaatttt

SEQ ID NO: 2853 - RNA, 30 nt, Homo sapiens
  source 1..30: mol_type = unassigned RNA
tctggccagattggttgatggactcattaa

SEQ ID NO: 2854 - RNA, 30 nt, Homo sapiens
  source 1..30: mol_type = unassigned RNA
aagaattctctggccagattggttgatgga

SEQ ID NO: 2855 - RNA, 30 nt, Homo sapiens
  source 1..30: mol_type = unassigned RNA
ataggtaaataatatacacaactttattat

SEQ ID NO: 2856 - RNA, 30 nt, Homo sapiens
  source 1..30: mol_type = unassigned RNA
attaaagaattctctggccagattggttga

SEQ ID NO: 2857 - RNA, 30 nt, Homo sapiens
  source 1..30: mol_type = unassigned RNA
taattaaagaattctctggccagattggtt

SEQ ID NO: 2858 - RNA, 30 nt, Homo sapiens
  source 1..30: mol_type = unassigned RNA
ggaagcattttaattaaagaattctctggc

SEQ ID NO: 2859 - RNA, 30 nt, Homo sapiens
  source 1..30: mol_type = unassigned RNA
gggaagcattttaattaaagaattctctgg

SEQ ID NO: 2860 - RNA, 30 nt, Homo sapiens
  source 1..30: mol_type = unassigned RNA
tcagtaaaatttgggaagcattttaattaa

SEQ ID NO: 2861 - RNA, 30 nt, Homo sapiens
  source 1..30: mol_type = unassigned RNA
agacctaatagagtgagaacctctgggggt

SEQ ID NO: 2862 - RNA, 30 nt, Homo sapiens
  source 1..30: mol_type = unassigned RNA
gaaatgcaaatccatgggacctgcttcaga

SEQ ID NO: 2863 - RNA, 30 nt, Homo sapiens
  source 1..30: mol_type = unassigned RNA
ttagaaatgcaaatccatgggacctgcttc

SEQ ID NO: 2864 - RNA, 30 nt, Homo sapiens
  source 1..30: mol_type = unassigned RNA
tgaatcagcctcatcagcaccacctgggag

SEQ ID NO: 2865 - RNA, 30 nt, Homo sapiens
  source 1..30: mol_type = unassigned RNA
taacaagctcccaggtggtgctgatgaggc

SEQ ID NO: 2866 - RNA, 30 nt, Homo sapiens
  source 1..30: mol_type = unassigned RNA
ctaacaagctcccaggtggtgctgatgagg

SEQ ID NO: 2867 - RNA, 30 nt, Homo sapiens
  source 1..30: mol_type = unassigned RNA
catttctaacaagctcccaggtggtgctga

SEQ ID NO: 2868 - RNA, 30 nt, Homo sapiens
  source 1..30: mol_type = unassigned RNA
gcatttctaacaagctcccaggtggtgctg

SEQ ID NO: 2869 - RNA, 30 nt, Homo sapiens
  source 1..30: mol_type = unassigned RNA
ggtctgaagcaggtcccatggatttgcatt

SEQ ID NO: 2870 - RNA, 30 nt, Homo sapiens
  source 1..30: mol_type = unassigned RNA
aattaaagaattctctggccagattggttg

SEQ ID NO: 2871 - RNA, 30 nt, Homo sapiens
  source 1..30: mol_type = unassigned RNA
attatatgtaatatatatattatatgttat

SEQ ID NO: 2872 - RNA, 30 nt, Homo sapiens
  source 1..30: mol_type = unassigned RNA
ttatatgtaatatatatattatatgttata

SEQ ID NO: 2873 - RNA, 30 nt, Homo sapiens
  source 1..30: mol_type = unassigned RNA
tatgtaatatatatattatatgttataata

SEQ ID NO: 2874 - RNA, 30 nt, Homo sapiens
  source 1..30: mol_type = unassigned RNA
ttaatggaagttaaactttatggctgcatt

SEQ ID NO: 2875 - RNA, 30 nt, Homo sapiens
  source 1..30: mol_type = unassigned RNA
gttaatggaagttaaactttatggctgcat

SEQ ID NO: 2876 - RNA, 30 nt, Homo sapiens
  source 1..30: mol_type = unassigned RNA
ctgtgagcagctttgttaatggaagttaaa

SEQ ID NO: 2877 - RNA, 30 nt, Homo sapiens
  source 1..30: mol_type = unassigned RNA
actgtgagcagctttgttaatggaagttaa

SEQ ID NO: 2878 - RNA, 30 nt, Homo sapiens
  source 1..30: mol_type = unassigned RNA
taataggtttactgtgagcagctttgttaa

SEQ ID NO: 2879 - RNA, 30 nt, Homo sapiens
  source 1..30: mol_type = unassigned RNA
ttataataggtttactgtgagcagctttgt

SEQ ID NO: 2880 - RNA, 30 nt, Homo sapiens
  source 1..30: mol_type = unassigned RNA
ctcctcactaggaagcccaaactgggaaac

SEQ ID NO: 2881 - RNA, 30 nt, Homo sapiens
  source 1..30: mol_type = unassigned RNA
ggttgctcctcactaggaagcccaaactgg

SEQ ID NO: 2882 - RNA, 30 nt, Homo sapiens
  source 1..30: mol_type = unassigned RNA
gtgtgagttaggttgctcctcactaggaag

SEQ ID NO: 2883 - RNA, 30 nt, Homo sapiens
  source 1..30: mol_type = unassigned RNA
cgtgtgagttaggttgctcctcactaggaa

SEQ ID NO: 2884 - RNA, 30 nt, Homo sapiens
  source 1..30: mol_type = unassigned RNA
tttcgtgtgagttaggttgctcctcactag

SEQ ID NO: 2885 - RNA, 30 nt, Homo sapiens
  source 1..30: mol_type = unassigned RNA
gggttgtttcgtgtgagttaggttgctcct

SEQ ID NO: 2886 - RNA, 30 nt, Homo sapiens
  source 1..30: mol_type = unassigned RNA
taagttggggttgtttcgtgtgagttaggt

SEQ ID NO: 2887 - RNA, 30 nt, Homo sapiens
  source 1..30: mol_type = unassigned RNA
taacagtcaatatattataagttggggttg

SEQ ID NO: 2888 - RNA, 30 nt, Homo sapiens
  source 1..30: mol_type = unassigned RNA
gtaacagtcaatatattataagttggggtt

SEQ ID NO: 2889 - RNA, 30 nt, Homo sapiens
  source 1..30: mol_type = unassigned RNA
tgtaacagtcaatatattataagttggggt

SEQ ID NO: 2890 - RNA, 30 nt, Homo sapiens
  source 1..30: mol_type = unassigned RNA
tggtctcagttttgtaacagtcaatatatt

SEQ ID NO: 2891 - RNA, 30 nt, Homo sapiens
  source 1..30: mol_type = unassigned RNA
ctggtctcagttttgtaacagtcaatatat

SEQ ID NO: 2892 - RNA, 30 nt, Homo sapiens
  source 1..30: mol_type = unassigned RNA
tctggtctcagttttgtaacagtcaatata

SEQ ID NO: 2893 - RNA, 30 nt, Homo sapiens
  source 1..30: mol_type = unassigned RNA
atgggattttctggtctcagttttgtaaca

SEQ ID NO: 2894 - RNA, 30 nt, Homo sapiens
  source 1..30: mol_type = unassigned RNA
ccgagagtctggaaatgataacagtaccat

SEQ ID NO: 2895 - RNA, 30 nt, Homo sapiens
  source 1..30: mol_type = unassigned RNA
ttcccgagagtctggaaatgataacagtac

SEQ ID NO: 2896 - RNA, 30 nt, Homo sapiens
  source 1..30: mol_type = unassigned RNA
atgttcttcccgagagtctggaaatgataa

SEQ ID NO: 2897 - RNA, 30 nt, Homo sapiens
  source 1..30: mol_type = unassigned RNA
ccagggaggctgcaataagtctatcctaaa

SEQ ID NO: 2898 - RNA, 30 nt, Homo sapiens
  source 1..30: mol_type = unassigned RNA
tgaagcagagttcccagggaggctgcaata

SEQ ID NO: 2899 - RNA, 30 nt, Homo sapiens
  source 1..30: mol_type = unassigned RNA
tgttctgaagcagagttcccagggaggctg

SEQ ID NO: 2900 - RNA, 30 nt, Homo sapiens
  source 1..30: mol_type = unassigned RNA
ataaaaataattatgttctgaagcagagtt

SEQ ID NO: 2901 - RNA, 30 nt, Homo sapiens
  source 1..30: mol_type = unassigned RNA
atggaagttaaactttatggctgcatttca

SEQ ID NO: 2902 - RNA, 30 nt, Homo sapiens
  source 1..30: mol_type = unassigned RNA
aactttatggctgcatttcataaggaaaaa

SEQ ID NO: 2903 - RNA, 30 nt, Homo sapiens
  source 1..30: mol_type = unassigned RNA
atggctgcatttcataaggaaaaaaaactt

SEQ ID NO: 2904 - RNA, 30 nt, Homo sapiens
  source 1..30: mol_type = unassigned RNA
tggctgcatttcataaggaaaaaaaacttc

SEQ ID NO: 2905 - RNA, 30 nt, Homo sapiens
  source 1..30: mol_type = unassigned RNA
ttccagaagaataactgctaaatgggcact

SEQ ID NO: 2906 - RNA, 30 nt, Homo sapiens
  source 1..30: mol_type = unassigned RNA
atgtgcgaactccaacatccaaaatacaat

SEQ ID NO: 2907 - RNA, 30 nt, Homo sapiens
  source 1..30: mol_type = unassigned RNA
tactaatggttaatgtgcgaactccaacat

SEQ ID NO: 2908 - RNA, 30 nt, Homo sapiens
  source 1..30: mol_type = unassigned RNA
ggtacttgtactaatggttaatgtgcgaac

SEQ ID NO: 2909 - RNA, 30 nt, Homo sapiens
  source 1..30: mol_type = unassigned RNA
tattgggtacttgtactaatggttaatgtg

SEQ ID NO: 2910 - RNA, 30 nt, Homo sapiens
  source 1..30: mol_type = unassigned RNA
ttatattgggtacttgtactaatggttaat

SEQ ID NO: 2911 - RNA, 30 nt, Homo sapiens
  source 1..30: mol_type = unassigned RNA
tcctgatgatctattgttatattgggtact

SEQ ID NO: 2912 - RNA, 30 nt, Homo sapiens
  source 1..30: mol_type = unassigned RNA
ttatcctgatgatctattgttatattgggt

SEQ ID NO: 2913 - RNA, 30 nt, Homo sapiens
  source 1..30: mol_type = unassigned RNA
attatcctgatgatctattgttatattggg

SEQ ID NO: 2914 - RNA, 30 nt, Homo sapiens
  source 1..30: mol_type = unassigned RNA
tcctgatataaagacatacaactaaaagat

SEQ ID NO: 2915 - RNA, 30 nt, Homo sapiens
  source 1..30: mol_type = unassigned RNA
atcctgatataaagacatacaactaaaaga

SEQ ID NO: 2916 - RNA, 30 nt, Homo sapiens
  source 1..30: mol_type = unassigned RNA
tctttatcctgatataaagacatacaacta

SEQ ID NO: 2917 - RNA, 30 nt, Homo sapiens
  source 1..30: mol_type = unassigned RNA
actcaattctctttatcctgatataaagac

SEQ ID NO: 2918 - RNA, 30 nt, Homo sapiens
  source 1..30: mol_type = unassigned RNA
gaaataaaaagtaactctgcattaataaaa

SEQ ID NO: 2919 - RNA, 30 nt, Homo sapiens
  source 1..30: mol_type = unassigned RNA
cactcaattctctttatcctgatataaaga

SEQ ID NO: 2920 - RNA, 30 nt, Homo sapiens
  source 1..30: mol_type = unassigned RNA
agataaatttcactcaattctctttatcct

SEQ ID NO: 2921 - RNA, 30 nt, Homo sapiens
  source 1..30: mol_type = unassigned RNA
tgggactaggtttagataaatttcactcaa

SEQ ID NO: 2922 - RNA, 30 nt, Homo sapiens
  source 1..30: mol_type = unassigned RNA
gtgggactaggtttagataaatttcactca

SEQ ID NO: 2923 - RNA, 30 nt, Homo sapiens
  source 1..30: mol_type = unassigned RNA
taaaagtatttgtgggactaggtttagata

SEQ ID NO: 2924 - RNA, 30 nt, Homo sapiens
  source 1..30: mol_type = unassigned RNA
acatgctctcttgtaaaagtatttgtggga

SEQ ID NO: 2925 - RNA, 30 nt, Homo sapiens
  source 1..30: mol_type = unassigned RNA
aacatgctctcttgtaaaagtatttgtggg

SEQ ID NO: 2926 - RNA, 30 nt, Homo sapiens
  source 1..30: mol_type = unassigned RNA
cactttaacatgctctcttgtaaaagtatt

SEQ ID NO: 2927 - RNA, 30 nt, Homo sapiens
  source 1..30: mol_type = unassigned RNA
acactttaacatgctctcttgtaaaagtat

SEQ ID NO: 2928 - RNA, 30 nt, Homo sapiens
  source 1..30: mol_type = unassigned RNA
atttacactttaacatgctctcttgtaaaa

SEQ ID NO: 2929 - RNA, 30 nt, Homo sapiens
  source 1..30: mol_type = unassigned RNA
aatttacactttaacatgctctcttgtaaa

SEQ ID NO: 2930 - RNA, 30 nt, Homo sapiens
  source 1..30: mol_type = unassigned RNA
caaagacagagtagaatgctaataaaaatt

SEQ ID NO: 2931 - RNA, 30 nt, Homo sapiens
  source 1..30: mol_type = unassigned RNA
ataaggaaaaaaaacttccaaagacagagt

SEQ ID NO: 2932 - RNA, 30 nt, Homo sapiens
  source 1..30: mol_type = unassigned RNA
cataaggaaaaaaaacttccaaagacagag

SEQ ID NO: 2933 - RNA, 30 nt, Homo sapiens
  source 1..30: mol_type = unassigned RNA
gataaatttcactcaattctctttatcctg

SEQ ID NO: 2934 - RNA, 30 nt, Homo sapiens
  source 1..30: mol_type = unassigned RNA
caggcgttgctttacaatctttgtaaaaaa

SEQ ID NO: 2935 - RNA, 30 nt, Homo sapiens
  source 1..30: mol_type = unassigned RNA
ttggaaataaaaagtaactctgcattaata

SEQ ID NO: 2936 - RNA, 30 nt, Homo sapiens
  source 1..30: mol_type = unassigned RNA
tgttggaaataaaaagtaactctgcattaa

SEQ ID NO: 2937 - RNA, 30 nt, Homo sapiens
  source 1..30: mol_type = unassigned RNA
gaacattttttagtcttctatgcttgcctg

SEQ ID NO: 2938 - RNA, 30 nt, Homo sapiens
  source 1..30: mol_type = unassigned RNA
tgaacattttttagtcttctatgcttgcct

SEQ ID NO: 2939 - RNA, 30 nt, Homo sapiens
  source 1..30: mol_type = unassigned RNA
ttttgaacattttttagtcttctatgcttg

SEQ ID NO: 2940 - RNA, 30 nt, Homo sapiens
  source 1..30: mol_type = unassigned RNA
cttttgaacattttttagtcttctatgctt

SEQ ID NO: 2941 - RNA, 30 nt, Homo sapiens
  source 1..30: mol_type = unassigned RNA
tcttttgaacattttttagtcttctatgct

SEQ ID NO: 2942 - RNA, 30 nt, Homo sapiens
  source 1..30: mol_type = unassigned RNA
ttcttttgaacattttttagtcttctatgc

SEQ ID NO: 2943 - RNA, 30 nt, Homo sapiens
  source 1..30: mol_type = unassigned RNA
atttttcttttgaacattttttagtcttct

SEQ ID NO: 2944 - RNA, 30 nt, Homo sapiens
  source 1..30: mol_type = unassigned RNA
aatttttcttttgaacattttttagtcttc

SEQ ID NO: 2945 - RNA, 30 nt, Homo sapiens
  source 1..30: mol_type = unassigned RNA
taaaaatgacaaggtcccatatagatagat

SEQ ID NO: 2946 - RNA, 30 nt, Homo sapiens
  source 1..30: mol_type = unassigned RNA
ctaaaaatgacaaggtcccatatagataga

SEQ ID NO: 2947 - RNA, 30 nt, Homo sapiens
  source 1..30: mol_type = unassigned RNA
tctaaaaatgacaaggtcccatatagatag

SEQ ID NO: 2948 - RNA, 30 nt, Homo sapiens
  source 1..30: mol_type = unassigned RNA
aaaaggatgaagcaggtgaatgttttctaa

SEQ ID NO: 2949 - RNA, 30 nt, Homo sapiens
  source 1..30: mol_type = unassigned RNA
tatgaagattcaaaaggatgaagcaggtga

SEQ ID NO: 2950 - RNA, 30 nt, Homo sapiens
  source 1..30: mol_type = unassigned RNA
tatagtatgcccatctcagagggattatat

SEQ ID NO: 2951 - RNA, 30 nt, Homo sapiens
  source 1..30: mol_type = unassigned RNA
aataagacaacttgtatagtatgcccatct

SEQ ID NO: 2952 - RNA, 30 nt, Homo sapiens
  source 1..30: mol_type = unassigned RNA
aaataagacaacttgtatagtatgcccatc

SEQ ID NO: 2953 - RNA, 30 nt, Homo sapiens
  source 1..30: mol_type = unassigned RNA
ccaatctttaaataagacaacttgtatagt

SEQ ID NO: 2954 - RNA, 30 nt, Homo sapiens
  source 1..30: mol_type = unassigned RNA
accaatctttaaataagacaacttgtatag

SEQ ID NO: 2955 - RNA, 30 nt, Homo sapiens
  source 1..30: mol_type = unassigned RNA
aatttaccaatctttaaataagacaacttg

SEQ ID NO: 2956 - RNA, 30 nt, Homo sapiens
  source 1..30: mol_type = unassigned RNA
agcttaaatttaccaatctttaaataagac

SEQ ID NO: 2957 - RNA, 30 nt, Homo sapiens
  source 1..30: mol_type = unassigned RNA
gagcttaaatttaccaatctttaaataaga

SEQ ID NO: 2958 - RNA, 30 nt, Homo sapiens
  source 1..30: mol_type = unassigned RNA
tttgagcttaaatttaccaatctttaaata

SEQ ID NO: 2959 - RNA, 30 nt, Homo sapiens
  source 1..30: mol_type = unassigned RNA
ccactgaataaattatttgagcttaaattt

SEQ ID NO: 2960 - RNA, 30 nt, Homo sapiens
  source 1..30: mol_type = unassigned RNA
cgagtctgcctctgaggcttgccactgaat

SEQ ID NO: 2961 - RNA, 30 nt, Homo sapiens
  source 1..30: mol_type = unassigned RNA
gacctgtgttccgagtctgcctctgaggct

SEQ ID NO: 2962 - RNA, 30 nt, Homo sapiens
  source 1..30: mol_type = unassigned RNA
taatatatatataatatatattagacctgt

SEQ ID NO: 2963 - RNA, 30 nt, Homo sapiens
  source 1..30: mol_type = unassigned RNA
tatgttataatatatatataatatatatta

SEQ ID NO: 2964 - RNA, 30 nt, Homo sapiens
  source 1..30: mol_type = unassigned RNA
aacattttttagtcttctatgcttgcctgc

SEQ ID NO: 2965 - RNA, 30 nt, Homo sapiens
  source 1..30: mol_type = unassigned RNA
tttagtcttctatgcttgcctgctcctttt

SEQ ID NO: 2966 - RNA, 30 nt, Homo sapiens
  source 1..30: mol_type = unassigned RNA
ttagtcttctatgcttgcctgctcctttta

SEQ ID NO: 2967 - RNA, 30 nt, Homo sapiens
  source 1..30: mol_type = unassigned RNA
tagtcttctatgcttgcctgctccttttaa

SEQ ID NO: 2968 - RNA, 30 nt, Homo sapiens
  source 1..30: mol_type = unassigned RNA
ttgttggaaataaaaagtaactctgcatta

SEQ ID NO: 2969 - RNA, 30 nt, Homo sapiens
  source 1..30: mol_type = unassigned RNA
aataataacaatagatatttttgttggaaa

SEQ ID NO: 2970 - RNA, 30 nt, Homo sapiens
  source 1..30: mol_type = unassigned RNA
tcagataaagctgtaagacttaaataataa

SEQ ID NO: 2971 - RNA, 30 nt, Homo sapiens
  source 1..30: mol_type = unassigned RNA
ctcagataaagctgtaagacttaaataata

SEQ ID NO: 2972 - RNA, 30 nt, Homo sapiens
  source 1..30: mol_type = unassigned RNA
gaatttctcagataaagctgtaagacttaa

SEQ ID NO: 2973 - RNA, 30 nt, Homo sapiens
  source 1..30: mol_type = unassigned RNA
tgagaagggtgctaattggaatttctcaga

SEQ ID NO: 2974 - RNA, 30 nt, Homo sapiens
  source 1..30: mol_type = unassigned RNA
ttatgagaagggtgctaattggaatttctc

SEQ ID NO: 2975 - RNA, 30 nt, Homo sapiens
  source 1..30: mol_type = unassigned RNA
attatgagaagggtgctaattggaatttct

SEQ ID NO: 2976 - RNA, 30 nt, Homo sapiens
  source 1..30: mol_type = unassigned RNA
aatatttattatgagaagggtgctaattgg

SEQ ID NO: 2977 - RNA, 30 nt, Homo sapiens
  source 1..30: mol_type = unassigned RNA
gaatatttattatgagaagggtgctaattg

SEQ ID NO: 2978 - RNA, 30 nt, Homo sapiens
  source 1..30: mol_type = unassigned RNA
atgtgtttgaatatttattatgagaagggt

SEQ ID NO: 2979 - RNA, 30 nt, Homo sapiens
  source 1..30: mol_type = unassigned RNA
catgtgtttgaatatttattatgagaaggg

SEQ ID NO: 2980 - RNA, 30 nt, Homo sapiens
  source 1..30: mol_type = unassigned RNA
tcatgtgtttgaatatttattatgagaagg

SEQ ID NO: 2981 - RNA, 30 nt, Homo sapiens
  source 1..30: mol_type = unassigned RNA
gttggaaataaaaagtaactctgcattaat

SEQ ID NO: 2982 - RNA, 30 nt, Homo sapiens
  source 1..30: mol_type = unassigned RNA
ttcatgtgtttgaatatttattatgagaag

SEQ ID NO: 2983 - RNA, 30 nt, Homo sapiens
  source 1..30: mol_type = unassigned RNA
ggtaatttttcatgtgtttgaatatttatt

SEQ ID NO: 2984 - RNA, 30 nt, Homo sapiens
  source 1..30: mol_type = unassigned RNA
aaagactagaacaactttggtaatttttca

SEQ ID NO: 2985 - RNA, 30 nt, Homo sapiens
  source 1..30: mol_type = unassigned RNA
aagtgacaagagtgcaggatcatgtaatat

SEQ ID NO: 2986 - RNA, 30 nt, Homo sapiens
  source 1..30: mol_type = unassigned RNA
aaagtgacaagagtgcaggatcatgtaata

SEQ ID NO: 2987 - RNA, 30 nt, Homo sapiens
  source 1..30: mol_type = unassigned RNA
taaagtgacaagagtgcaggatcatgtaat

SEQ ID NO: 2988 - RNA, 30 nt, Homo sapiens
  source 1..30: mol_type = unassigned RNA
ttaaagtgacaagagtgcaggatcatgtaa

SEQ ID NO: 2989 - RNA, 30 nt, Homo sapiens
  source 1..30: mol_type = unassigned RNA
aaaaactatataagaaaaaaatcatcagaa

SEQ ID NO: 2990 - RNA, 30 nt, Homo sapiens
  source 1..30: mol_type = unassigned RNA
aaaaaactatataagaaaaaaatcatcaga

SEQ ID NO: 2991 - RNA, 30 nt, Homo sapiens
  source 1..30: mol_type = unassigned RNA
taaaaaactatataagaaaaaaatcatcag

SEQ ID NO: 2992 - RNA, 30 nt, Homo sapiens
  source 1..30: mol_type = unassigned RNA
cctgctccttttaaaaaactatataagaaa

SEQ ID NO: 2993 - RNA, 30 nt, Homo sapiens
  source 1..30: mol_type = unassigned RNA
tatgcttgcctgctccttttaaaaaactat

SEQ ID NO: 2994 - RNA, 30 nt, Homo sapiens
  source 1..30: mol_type = unassigned RNA
gtcttctatgcttgcctgctccttttaaaa

SEQ ID NO: 2995 - RNA, 30 nt, Homo sapiens
  source 1..30: mol_type = unassigned RNA
agtcttctatgcttgcctgctccttttaaa

SEQ ID NO: 2996 - RNA, 30 nt, Homo sapiens
  source 1..30: mol_type = unassigned RNA
gtaatttttcatgtgtttgaatatttatta

SEQ ID NO: 2997 - RNA, 30 nt, Homo sapiens
  source 1..30: mol_type = unassigned RNA
gtggatttagtcttttgcagaaaaaaagat

SEQ ID NO: 2998 - RNA, 30 nt, Homo sapiens
  source 1..30: mol_type = unassigned RNA
ggaagtaaaatattttgtaaagattaccat

SEQ ID NO: 2999 - RNA, 30 nt, Homo sapiens
  source 1..30: mol_type = unassigned RNA
gtaaagattaccatagatttaaaaatgtta

SEQ ID NO: 3000 - RNA, 30 nt, Homo sapiens
  source 1..30: mol_type = unassigned RNA
cctttttgtgggggaaagggatgagggcaa

SEQ ID NO: 3001 - RNA, 30 nt, Homo sapiens
  source 1..30: mol_type = unassigned RNA
acctttttgtgggggaaagggatgagggca

SEQ ID NO: 3002 - RNA, 30 nt, Homo sapiens
  source 1..30: mol_type = unassigned RNA
aaatgaacaactggagacaaatttaccttt

SEQ ID NO: 3003 - RNA, 30 nt, Homo sapiens
  source 1..30: mol_type = unassigned RNA
taacttaaaatgaacaactggagacaaatt

SEQ ID NO: 3004 - RNA, 30 nt, Homo sapiens
  source 1..30: mol_type = unassigned RNA
ataacttaaaatgaacaactggagacaaat

SEQ ID NO: 3005 - RNA, 30 nt, Homo sapiens
  source 1..30: mol_type = unassigned RNA
ctttataacttaaaatgaacaactggagac

SEQ ID NO: 3006 - RNA, 30 nt, Homo sapiens
  source 1..30: mol_type = unassigned RNA
gctttataacttaaaatgaacaactggaga

SEQ ID NO: 3007 - RNA, 30 nt, Homo sapiens
  source 1..30: mol_type = unassigned RNA
gccacatgaacatacataatcctggcagga

SEQ ID NO: 3008 - RNA, 30 nt, Homo sapiens
  source 1..30: mol_type = unassigned RNA
cacatgtatcttagccacatgaacatacat

SEQ ID NO: 3009 - RNA, 30 nt, Homo sapiens
  source 1..30: mol_type = unassigned RNA
gcaagcacttgcacatgtatcttagccaca

SEQ ID NO: 3010 - RNA, 30 nt, Homo sapiens
  source 1..30: mol_type = unassigned RNA
gcacacaaaccctgctcttagcaagcactt

SEQ ID NO: 3011 - RNA, 30 nt, Homo sapiens
  source 1..30: mol_type = unassigned RNA
cagcaatcgttggcacacaaaccctgctct

SEQ ID NO: 3012 - RNA, 30 nt, Homo sapiens
  source 1..30: mol_type = unassigned RNA
ccagcaatcgttggcacacaaaccctgctc

SEQ ID NO: 3013 - RNA, 30 nt, Homo sapiens
  source 1..30: mol_type = unassigned RNA
tccagcaatcgttggcacacaaaccctgct

SEQ ID NO: 3014 - RNA, 30 nt, Homo sapiens
  source 1..30: mol_type = unassigned RNA
cagagaattttccagcaatcgttggcacac

SEQ ID NO: 3015 - RNA, 30 nt, Homo sapiens
  source 1..30: mol_type = unassigned RNA
gcagagaattttccagcaatcgttggcaca

SEQ ID NO: 3016 - RNA, 30 nt, Homo sapiens
  source 1..30: mol_type = unassigned RNA
tttgcagagaattttccagcaatcgttggc

SEQ ID NO: 3017 - RNA, 30 nt, Homo sapiens
  source 1..30: mol_type = unassigned RNA
cagccacaaacaattctttgcagagaattt

SEQ ID NO: 3018 - RNA, 30 nt, Homo sapiens
  source 1..30: mol_type = unassigned RNA
tcacccattgcagccacaaacaattctttg

SEQ ID NO: 3019 - RNA, 30 nt, Homo sapiens
  source 1..30: mol_type = unassigned RNA
tatatgtgtattctcacccattgcagccac

SEQ ID NO: 3020 - RNA, 30 nt, Homo sapiens
  source 1..30: mol_type = unassigned RNA
aagatcatctcaattatatatgtgtattct

SEQ ID NO: 3021 - RNA, 30 nt, Homo sapiens
  source 1..30: mol_type = unassigned RNA
tgttgaagatcatctcaattatatatgtgt

SEQ ID NO: 3022 - RNA, 30 nt, Homo sapiens
  source 1..30: mol_type = unassigned RNA
tagatataaccttatgttgaagatcatctc

SEQ ID NO: 3023 - RNA, 30 nt, Homo sapiens
  source 1..30: mol_type = unassigned RNA
atagatataaccttatgttgaagatcatct

SEQ ID NO: 3024 - RNA, 30 nt, Homo sapiens
  source 1..30: mol_type = unassigned RNA
tatatttatagatataaccttatgttgaag

SEQ ID NO: 3025 - RNA, 30 nt, Homo sapiens
  source 1..30: mol_type = unassigned RNA
atatatttatagatataaccttatgttgaa

SEQ ID NO: 3026 - RNA, 30 nt, Homo sapiens
  source 1..30: mol_type = unassigned RNA
tgcataaactatatttatatatttatagat

SEQ ID NO: 3027 - RNA, 30 nt, Homo sapiens
  source 1..30: mol_type = unassigned RNA
ttgtgggggaaagggatgagggcaattagg

SEQ ID NO: 3028 - RNA, 30 nt, Homo sapiens
  source 1..30: mol_type = unassigned RNA
gtgcataaactatatttatatatttataga

SEQ ID NO: 3029 - RNA, 30 nt, Homo sapiens
  source 1..30: mol_type = unassigned RNA
tgtgggggaaagggatgagggcaattagga

SEQ ID NO: 3030 - RNA, 30 nt, Homo sapiens
  source 1..30: mol_type = unassigned RNA
tgggggaaagggatgagggcaattaggagg

SEQ ID NO: 3031 - RNA, 30 nt, Homo sapiens
  source 1..30: mol_type = unassigned RNA
tggactgcggggctgaaaaaagaggttcca

SEQ ID NO: 3032 - RNA, 30 nt, Homo sapiens
  source 1..30: mol_type = unassigned RNA
gctgggaggggctcggtgctggggctgaga

SEQ ID NO: 3033 - RNA, 30 nt, Homo sapiens
  source 1..30: mol_type = unassigned RNA
tgcagagccacccgcttggctgggaggggc

SEQ ID NO: 3034 - RNA, 30 nt, Homo sapiens
  source 1..30: mol_type = unassigned RNA
ctgcagagccacccgcttggctgggagggg

SEQ ID NO: 3035 - RNA, 30 nt, Homo sapiens
  source 1..30: mol_type = unassigned RNA
tctgcagagccacccgcttggctgggaggg

SEQ ID NO: 3036 - RNA, 30 nt, Homo sapiens
  source 1..30: mol_type = unassigned RNA
tgtggccgggcggggctcgagccagctttt

SEQ ID NO: 3037 - RNA, 30 nt, Homo sapiens
  source 1..30: mol_type = unassigned RNA
gtgtggccgggcggggctcgagccagcttt

SEQ ID NO: 3038 - RNA, 30 nt, Homo sapiens
  source 1..30: mol_type = unassigned RNA
ggctgggggaaaaaaagccccgagctccgc

SEQ ID NO: 3039 - RNA, 30 nt, Homo sapiens
  source 1..30: mol_type = unassigned RNA
tggaaaatcatagagaacagagggtgggcg

SEQ ID NO: 3040 - RNA, 30 nt, Homo sapiens
  source 1..30: mol_type = unassigned RNA
gagaagcccctcgcggggtctccattctgg

SEQ ID NO: 3041 - RNA, 30 nt, Homo sapiens
  source 1..30: mol_type = unassigned RNA
tggaaagcgggggtagctcaggacactgcg

SEQ ID NO: 3042 - RNA, 30 nt, Homo sapiens
  source 1..30: mol_type = unassigned RNA
tggacgtgcgagtgaactgcgaattgtgga

SEQ ID NO: 3043 - RNA, 30 nt, Homo sapiens
  source 1..30: mol_type = unassigned RNA
ctggacgtgcgagtgaactgcgaattgtgg

SEQ ID NO: 3044 - RNA, 30 nt, Homo sapiens
  source 1..30: mol_type = unassigned RNA
tcagaacctttctggacgtgcgagtgaact

SEQ ID NO: 3045 - RNA, 30 nt, Homo sapiens
  source 1..30: mol_type = unassigned RNA
tgaggggtgcagaaagcgaggcgagatcgc

SEQ ID NO: 3046 - RNA, 30 nt, Homo sapiens
  source 1..30: mol_type = unassigned RNA
ctgaggggtgcagaaagcgaggcgagatcg

SEQ ID NO: 3047 - RNA, 30 nt, Homo sapiens
  source 1..30: mol_type = unassigned RNA
cagccactagcctgcagcggaaacctttct

SEQ ID NO: 3048 - RNA, 30 nt, Homo sapiens
  source 1..30: mol_type = unassigned RNA
gcagccactagcctgcagcggaaacctttc

SEQ ID NO: 3049 - RNA, 30 nt, Homo sapiens
  source 1..30: mol_type = unassigned RNA
aaatgataataatactgatgatgacgatga

SEQ ID NO: 3050 - RNA, 30 nt, Homo sapiens
  source 1..30: mol_type = unassigned RNA
gaaatgataataatactgatgatgacgatg

SEQ ID NO: 3051 - RNA, 30 nt, Homo sapiens
  source 1..30: mol_type = unassigned RNA
aataataacaacgatttgaaatgataataa

SEQ ID NO: 3052 - RNA, 30 nt, Homo sapiens
  source 1..30: mol_type = unassigned RNA
aacaaatgagaacaaacaaggctactgaat

SEQ ID NO: 3053 - RNA, 30 nt, Homo sapiens
  source 1..30: mol_type = unassigned RNA
gaacaaatgagaacaaacaaggctactgaa

SEQ ID NO: 3054 - RNA, 30 nt, Homo sapiens
  source 1..30: mol_type = unassigned RNA
tgaacaaatgagaacaaacaaggctactga

SEQ ID NO: 3055 - RNA, 30 nt, Homo sapiens
  source 1..30: mol_type = unassigned RNA
accaagagcaatccacgtcccttttgaaca

SEQ ID NO: 3056 - RNA, 30 nt, Homo sapiens
  source 1..30: mol_type = unassigned RNA
atccttaaccaagagcaatccacgtccctt

SEQ ID NO: 3057 - RNA, 30 nt, Homo sapiens
  source 1..30: mol_type = unassigned RNA
ggaggaagcaaagcgaacgcaacaagggtt

SEQ ID NO: 3058 - RNA, 30 nt, Homo sapiens
  source 1..30: mol_type = unassigned RNA
gtgggggaaagggatgagggcaattaggag

SEQ ID NO: 3059 - RNA, 30 nt, Homo sapiens
  source 1..30: mol_type = unassigned RNA
tgtgcataaactatatttatatatttatag

SEQ ID NO: 3060 - RNA, 30 nt, Homo sapiens
  source 1..30: mol_type = unassigned RNA
aaattttgtgcataaactatatttatatat

SEQ ID NO: 3061 - RNA, 30 nt, Homo sapiens
  source 1..30: mol_type = unassigned RNA
aggggaaaaaacttaaaattttgtgcataa

SEQ ID NO: 3062 - RNA, 30 nt, Homo sapiens
  source 1..30: mol_type = unassigned RNA
atttcaaaatctattattttaatactgcag

SEQ ID NO: 3063 - RNA, 30 nt, Homo sapiens
  source 1..30: mol_type = unassigned RNA
gaattaatttcaaaatctattattttaata

SEQ ID NO: 3064 - RNA, 30 nt, Homo sapiens
  source 1..30: mol_type = unassigned RNA
aaattggaattaatttcaaaatctattatt

SEQ ID NO: 3065 - RNA, 30 nt, Homo sapiens
  source 1..30: mol_type = unassigned RNA
gaaattggaattaatttcaaaatctattat

SEQ ID NO: 3066 - RNA, 30 nt, Homo sapiens
  source 1..30: mol_type = unassigned RNA
tctttgaaattggaattaatttcaaaatct

SEQ ID NO: 3067 - RNA, 30 nt, Homo sapiens
  source 1..30: mol_type = unassigned RNA
attatctttgaaattggaattaatttcaaa

SEQ ID NO: 3068 - RNA, 30 nt, Homo sapiens
  source 1..30: mol_type = unassigned RNA
atgaatcaggaaaaaagcactcgccctgat

SEQ ID NO: 3069 - RNA, 30 nt, Homo sapiens
  source 1..30: mol_type = unassigned RNA
aatgaatcaggaaaaaagcactcgccctga

SEQ ID NO: 3070 - RNA, 30 nt, Homo sapiens
  source 1..30: mol_type = unassigned RNA
tttaatgaatcaggaaaaaagcactcgccc

SEQ ID NO: 3071 - RNA, 30 nt, Homo sapiens
  source 1..30: mol_type = unassigned RNA
caatcatgctgaatacataattgtttaatg

SEQ ID NO: 3072 - RNA, 30 nt, Homo sapiens
  source 1..30: mol_type = unassigned RNA
tatgcacctcttacaatcatgctgaataca

SEQ ID NO: 3073 - RNA, 30 nt, Homo sapiens
  source 1..30: mol_type = unassigned RNA
gaaaagataatggggaatattatatgcacc

SEQ ID NO: 3074 - RNA, 30 nt, Homo sapiens
  source 1..30: mol_type = unassigned RNA
attagaaaagataatggggaatattatatg

SEQ ID NO: 3075 - RNA, 30 nt, Homo sapiens
  source 1..30: mol_type = unassigned RNA
agaaggtgcccacttcattagaaaagataa

SEQ ID NO: 3076 - RNA, 30 nt, Homo sapiens
  source 1..30: mol_type = unassigned RNA
tatatccattcagaaggtgcccacttcatt

SEQ ID NO: 3077 - RNA, 30 nt, Homo sapiens
  source 1..30: mol_type = unassigned RNA
cttatatatccattcagaaggtgcccactt

SEQ ID NO: 3078 - RNA, 30 nt, Homo sapiens
  source 1..30: mol_type = unassigned RNA
tagttacttatatatccattcagaaggtgc

SEQ ID NO: 3079 - RNA, 30 nt, Homo sapiens
  source 1..30: mol_type = unassigned RNA
ctagttacttatatatccattcagaaggtg

SEQ ID NO: 3080 - RNA, 30 nt, Homo sapiens
  source 1..30: mol_type = unassigned RNA
atttctagttacttatatatccattcagaa

SEQ ID NO: 3081 - RNA, 30 nt, Homo sapiens
  source 1..30: mol_type = unassigned RNA
catttctagttacttatatatccattcaga

SEQ ID NO: 3082 - RNA, 30 nt, Homo sapiens
  source 1..30: mol_type = unassigned RNA
tcatttctagttacttatatatccattcag

SEQ ID NO: 3083 - RNA, 30 nt, Homo sapiens
  source 1..30: mol_type = unassigned RNA
tgaccaaatcctcagcttttcatttctagt

SEQ ID NO: 3084 - RNA, 30 nt, Homo sapiens
  source 1..30: mol_type = unassigned RNA
tcctgaaattctgaccaaatcctcagcttt

SEQ ID NO: 3085 - RNA, 30 nt, Homo sapiens
  source 1..30: mol_type = unassigned RNA
atcctgaaattctgaccaaatcctcagctt

SEQ ID NO: 3086 - RNA, 30 nt, Homo sapiens
  source 1..30: mol_type = unassigned RNA
tatcctgaaattctgaccaaatcctcagct

SEQ ID NO: 3087 - RNA, 30 nt, Homo sapiens
  source 1..30: mol_type = unassigned RNA
agttttatcctgaaattctgaccaaatcct

SEQ ID NO: 3088 - RNA, 30 nt, Homo sapiens
  source 1..30: mol_type = unassigned RNA
cagttttatcctgaaattctgaccaaatcc

SEQ ID NO: 3089 - RNA, 30 nt, Homo sapiens
  source 1..30: mol_type = unassigned RNA
caaaatctattattttaatactgcagaagt

SEQ ID NO: 3090 - RNA, 30 nt, Homo sapiens
  source 1..30: mol_type = unassigned RNA
aaaatctattattttaatactgcagaagta

SEQ ID NO: 3091 - RNA, 30 nt, Homo sapiens
  source 1..30: mol_type = unassigned RNA
ttttaatactgcagaagtagtgtttttttc

SEQ ID NO: 3092 - RNA, 30 nt, Homo sapiens
  source 1..30: mol_type = unassigned RNA
taatactgcagaagtagtgtttttttcatg

SEQ ID NO: 3093 - RNA, 30 nt, Homo sapiens
  source 1..30: mol_type = unassigned RNA
caggggaaaaaacttaaaattttgtgcata

SEQ ID NO: 3094 - RNA, 30 nt, Homo sapiens
  source 1..30: mol_type = unassigned RNA
gaagaacagtttcaggggaaaaaacttaaa

SEQ ID NO: 3095 - RNA, 30 nt, Homo sapiens
  source 1..30: mol_type = unassigned RNA
aggctgtatcaagaatcagcagttggaaga

SEQ ID NO: 3096 - RNA, 30 nt, Homo sapiens
  source 1..30: mol_type = unassigned RNA
acgatccatgtatctgtgtaggattgaggc

SEQ ID NO: 3097 - RNA, 30 nt, Homo sapiens
  source 1..30: mol_type = unassigned RNA
cacgatccatgtatctgtgtaggattgagg

SEQ ID NO: 3098 - RNA, 30 nt, Homo sapiens
  source 1..30: mol_type = unassigned RNA
gatggcggctaccatttcacgatccatgta

SEQ ID NO: 3099 - RNA, 30 nt, Homo sapiens
  source 1..30: mol_type = unassigned RNA
ggatggcggctaccatttcacgatccatgt

SEQ ID NO: 3100 - RNA, 30 nt, Homo sapiens
  source 1..30: mol_type = unassigned RNA
tttggatggcggctaccatttcacgatcca

SEQ ID NO: 3101 - RNA, 30 nt, Homo sapiens
  source 1..30: mol_type = unassigned RNA
atttggatggcggctaccatttcacgatcc

SEQ ID NO: 3102 - RNA, 30 nt, Homo sapiens
  source 1..30: mol_type = unassigned RNA
tatttggatggcggctaccatttcacgatc

SEQ ID NO: 3103 - RNA, 30 nt, Homo sapiens
  source 1..30: mol_type = unassigned RNA
ttatttggatggcggctaccatttcacgat

SEQ ID NO: 3104 - RNA, 30 nt, Homo sapiens
  source 1..30: mol_type = unassigned RNA
gggtgggatttttatttggatggcggctac

SEQ ID NO: 3105 - RNA, 30 nt, Homo sapiens
  source 1..30: mol_type = unassigned RNA
ggggtgggatttttatttggatggcggcta

SEQ ID NO: 3106 - RNA, 30 nt, Homo sapiens
  source 1..30: mol_type = unassigned RNA
caggactgcatacagctcaactgcccctcc

SEQ ID NO: 3107 - RNA, 30 nt, Homo sapiens
  source 1..30: mol_type = unassigned RNA
tcatatttggggtgggatttttatttggat

SEQ ID NO: 3108 - RNA, 30 nt, Homo sapiens
  source 1..30: mol_type = unassigned RNA
cgtttgtcatatttggggtgggatttttat

SEQ ID NO: 3109 - RNA, 30 nt, Homo sapiens
  source 1..30: mol_type = unassigned RNA
tggccagaaaggatgcttgcgtttgtcata

SEQ ID NO: 3110 - RNA, 30 nt, Homo sapiens
  source 1..30: mol_type = unassigned RNA
aattatggccagaaaggatgcttgcgtttg

SEQ ID NO: 3111 - RNA, 30 nt, Homo sapiens
  source 1..30: mol_type = unassigned RNA
caaatgcagttaaattatggccagaaagga

SEQ ID NO: 3112 - RNA, 30 nt, Homo sapiens
  source 1..30: mol_type = unassigned RNA
gcaaatgcagttaaattatggccagaaagg

SEQ ID NO: 3113 - RNA, 30 nt, Homo sapiens
  source 1..30: mol_type = unassigned RNA
atgatttgcaaatgcagttaaattatggcc

SEQ ID NO: 3114 - RNA, 30 nt, Homo sapiens
  source 1..30: mol_type = unassigned RNA
catgatttgcaaatgcagttaaattatggc

SEQ ID NO: 3115 - RNA, 30 nt, Homo sapiens
  source 1..30: mol_type = unassigned RNA
tcatgatttgcaaatgcagttaaattatgg

SEQ ID NO: 3116 - RNA, 30 nt, Homo sapiens
  source 1..30: mol_type = unassigned RNA
ttcatgatttgcaaatgcagttaaattatg

SEQ ID NO: 3117 - RNA, 30 nt, Homo sapiens
  source 1..30: mol_type = unassigned RNA
tttcatgatttgcaaatgcagttaaattat

SEQ ID NO: 3118 - RNA, 30 nt, Homo sapiens
  source 1..30: mol_type = unassigned RNA
ttttcatgatttgcaaatgcagttaaatta

SEQ ID NO: 3119 - RNA, 30 nt, Homo sapiens
  source 1..30: mol_type = unassigned RNA
atactgcagaagtagtgtttttttcatgat

SEQ ID NO: 3120 - RNA, 30 nt, Homo sapiens
  source 1..30: mol_type = unassigned RNA
aatactgcagaagtagtgtttttttcatga

SEQ ID NO: 3121 - RNA, 30 nt, Homo sapiens
  source 1..30: mol_type = unassigned RNA
gtcatatttggggtgggatttttatttgga

SEQ ID NO: 3122 - RNA, 30 nt, Homo sapiens
  source 1..30: mol_type = unassigned RNA
ctcttccccgccagtctcggagcctgaggt

SEQ ID NO: 3123 - RNA, 30 nt, Homo sapiens
  source 1..30: mol_type = unassigned RNA
cccgccagtctcggagcctgaggtctcccc

SEQ ID NO: 3124 - RNA, 30 nt, Homo sapiens
  source 1..30: mol_type = unassigned RNA
cggcagctttccctgtctccgcatcctgca

SEQ ID NO: 3125 - RNA, 30 nt, Homo sapiens
  source 1..30: mol_type = unassigned RNA
caaaatgtcccttaagcccatttaaggcaa

SEQ ID NO: 3126 - RNA, 30 nt, Homo sapiens
  source 1..30: mol_type = unassigned RNA
ccaaaatgtcccttaagcccatttaaggca

SEQ ID NO: 3127 - RNA, 30 nt, Homo sapiens
  source 1..30: mol_type = unassigned RNA
taaagcactttccaaaatgtcccttaagcc

SEQ ID NO: 3128 - RNA, 30 nt, Homo sapiens
  source 1..30: mol_type = unassigned RNA
aactagagaagaaataaaaaaaaaaaaggt

SEQ ID NO: 3129 - RNA, 30 nt, Homo sapiens
  source 1..30: mol_type = unassigned RNA
ttaaactagagaagaaataaaaaaaaaaaa

SEQ ID NO: 3130 - RNA, 30 nt, Homo sapiens
  source 1..30: mol_type = unassigned RNA
ttcttaaactagagaagaaataaaaaaaaa

SEQ ID NO: 3131 - RNA, 30 nt, Homo sapiens
  source 1..30: mol_type = unassigned RNA
cttcttaaactagagaagaaataaaaaaaa

SEQ ID NO: 3132 - RNA, 30 nt, Homo sapiens
  source 1..30: mol_type = unassigned RNA
tcttcttaaactagagaagaaataaaaaaa

SEQ ID NO: 3133 - RNA, 30 nt, Homo sapiens
  source 1..30: mol_type = unassigned RNA
ctattttcttcttaaactagagaagaaata

SEQ ID NO: 3134 - RNA, 30 nt, Homo sapiens
  source 1..30: mol_type = unassigned RNA
cctattttcttcttaaactagagaagaaat

SEQ ID NO: 3135 - RNA, 30 nt, Homo sapiens
  source 1..30: mol_type = unassigned RNA
cccctttcctattttcttcttaaactagag

SEQ ID NO: 3136 - RNA, 30 nt, Homo sapiens
  source 1..30: mol_type = unassigned RNA
acccctttcctattttcttcttaaactaga

SEQ ID NO: 3137 - RNA, 30 nt, Homo sapiens
  source 1..30: mol_type = unassigned RNA
cctttacccctttcctattttcttcttaaa

SEQ ID NO: 3138 - RNA, 30 nt, Homo sapiens
  source 1..30: mol_type = unassigned RNA
tcccaccttccctttacccctttcctattt

SEQ ID NO: 3139 - RNA, 30 nt, Homo sapiens
  source 1..30: mol_type = unassigned RNA
ctcccaccttccctttacccctttcctatt

SEQ ID NO: 3140 - RNA, 30 nt, Homo sapiens
  source 1..30: mol_type = unassigned RNA
ctttctcccaccttccctttacccctttcc

SEQ ID NO: 3141 - RNA, 30 nt, Homo sapiens
  source 1..30: mol_type = unassigned RNA
cctttctcccaccttccctttacccctttc

SEQ ID NO: 3142 - RNA, 30 nt, Homo sapiens
  source 1..30: mol_type = unassigned RNA
tcctttctcccaccttccctttaccccttt

SEQ ID NO: 3143 - RNA, 30 nt, Homo sapiens
  source 1..30: mol_type = unassigned RNA
ttcctttctcccaccttccctttacccctt

SEQ ID NO: 3144 - RNA, 30 nt, Homo sapiens
  source 1..30: mol_type = unassigned RNA
tttttcctttctcccaccttccctttaccc

SEQ ID NO: 3145 - RNA, 30 nt, Homo sapiens
  source 1..30: mol_type = unassigned RNA
ctttttcctttctcccaccttccctttacc

SEQ ID NO: 3146 - RNA, 30 nt, Homo sapiens
  source 1..30: mol_type = unassigned RNA
tctttttcctttctcccaccttccctttac

SEQ ID NO: 3147 - RNA, 30 nt, Homo sapiens
  source 1..30: mol_type = unassigned RNA
caattttctttttcctttctcccaccttcc

SEQ ID NO: 3148 - RNA, 30 nt, Homo sapiens
  source 1..30: mol_type = unassigned RNA
gcaattttctttttcctttctcccaccttc

SEQ ID NO: 3149 - RNA, 30 nt, Homo sapiens
  source 1..30: mol_type = unassigned RNA
actttgcaattttctttttcctttctccca

SEQ ID NO: 3150 - RNA, 30 nt, Homo sapiens
  source 1..30: mol_type = unassigned RNA
gactttgcaattttctttttcctttctccc

SEQ ID NO: 3151 - RNA, 30 nt, Homo sapiens
  source 1..30: mol_type = unassigned RNA
aaacagcgggatgggaccgctttgactttg

SEQ ID NO: 3152 - RNA, 30 nt, Homo sapiens
  source 1..30: mol_type = unassigned RNA
agcccatttaaggcaaacagttaaggtagc

SEQ ID NO: 3153 - RNA, 30 nt, Homo sapiens
  source 1..30: mol_type = unassigned RNA
aaggcaaacagttaaggtagcttcctcccc

SEQ ID NO: 3154 - RNA, 30 nt, Homo sapiens
  source 1..30: mol_type = unassigned RNA
aggcaaacagttaaggtagcttcctcccct

SEQ ID NO: 3155 - RNA, 30 nt, Homo sapiens
  source 1..30: mol_type = unassigned RNA
aggtagcttcctcccctcacgattgagtcc

SEQ ID NO: 3156 - RNA, 30 nt, Homo sapiens
  source 1..30: mol_type = unassigned RNA
tagagctcaagagaggaggtgagaggtggg

SEQ ID NO: 3157 - RNA, 30 nt, Homo sapiens
  source 1..30: mol_type = unassigned RNA
taaaatatctctgaatgcttctagagctca

SEQ ID NO: 3158 - RNA, 30 nt, Homo sapiens
  source 1..30: mol_type = unassigned RNA
ataaaatatctctgaatgcttctagagctc

SEQ ID NO: 3159 - RNA, 30 nt, Homo sapiens
  source 1..30: mol_type = unassigned RNA
tttataaaatatctctgaatgcttctagag

SEQ ID NO: 3160 - RNA, 30 nt, Homo sapiens
  source 1..30: mol_type = unassigned RNA
ctttataaaatatctctgaatgcttctaga

SEQ ID NO: 3161 - RNA, 30 nt, Homo sapiens
  source 1..30: mol_type = unassigned RNA
tctttataaaatatctctgaatgcttctag

SEQ ID NO: 3162 - RNA, 30 nt, Homo sapiens
  source 1..30: mol_type = unassigned RNA
ttctttataaaatatctctgaatgcttcta

SEQ ID NO: 3163 - RNA, 30 nt, Homo sapiens
  source 1..30: mol_type = unassigned RNA
acatctttttctttataaaatatctctgaa

SEQ ID NO: 3164 - RNA, 30 nt, Homo sapiens
  source 1..30: mol_type = unassigned RNA
ccattaacatctttttctttataaaatatc

SEQ ID NO: 3165 - RNA, 30 nt, Homo sapiens
  source 1..30: mol_type = unassigned RNA
ctggtcctgtgttaccattaacatcttttt

SEQ ID NO: 3166 - RNA, 30 nt, Homo sapiens
  source 1..30: mol_type = unassigned RNA
tctgccctcccacctcccccagaactgccc

SEQ ID NO: 3167 - RNA, 30 nt, Homo sapiens
  source 1..30: mol_type = unassigned RNA
catagacctcttctctgccctcccacctcc

SEQ ID NO: 3168 - RNA, 30 nt, Homo sapiens
  source 1..30: mol_type = unassigned RNA
ccatagacctcttctctgccctcccacctc

SEQ ID NO: 3169 - RNA, 30 nt, Homo sapiens
  source 1..30: mol_type = unassigned RNA
caaacagcgggatgggaccgctttgacttt

SEQ ID NO: 3170 - RNA, 30 nt, Homo sapiens
  source 1..30: mol_type = unassigned RNA
gatttccatagacctcttctctgccctccc

SEQ ID NO: 3171 - RNA, 30 nt, Homo sapiens
  source 1..30: mol_type = unassigned RNA
gctttagatttccatagacctcttctctgc

SEQ ID NO: 3172 - RNA, 30 nt, Homo sapiens
  source 1..30: mol_type = unassigned RNA
ttcgctttagatttccatagacctcttctc

SEQ ID NO: 3173 - RNA, 30 nt, Homo sapiens
  source 1..30: mol_type = unassigned RNA
aaagaaattcttcgctttagatttccatag

SEQ ID NO: 3174 - RNA, 30 nt, Homo sapiens
  source 1..30: mol_type = unassigned RNA
aaaagaaattcttcgctttagatttccata

SEQ ID NO: 3175 - RNA, 30 nt, Homo sapiens
  source 1..30: mol_type = unassigned RNA
taaaagaaattcttcgctttagatttccat

SEQ ID NO: 3176 - RNA, 30 nt, Homo sapiens
  source 1..30: mol_type = unassigned RNA
taccttttaaaagaaattcttcgctttaga

SEQ ID NO: 3177 - RNA, 30 nt, Homo sapiens
  source 1..30: mol_type = unassigned RNA
cccgcttctaccttttaaaagaaattcttc

SEQ ID NO: 3178 - RNA, 30 nt, Homo sapiens
  source 1..30: mol_type = unassigned RNA
tctacccataggagggcaacttacccgctt

SEQ ID NO: 3179 - RNA, 30 nt, Homo sapiens
  source 1..30: mol_type = unassigned RNA
aatatggaaacagaataaattctctaccca

SEQ ID NO: 3180 - RNA, 30 nt, Homo sapiens
  source 1..30: mol_type = unassigned RNA
aaatatggaaacagaataaattctctaccc

SEQ ID NO: 3181 - RNA, 30 nt, Homo sapiens
  source 1..30: mol_type = unassigned RNA
taaatatggaaacagaataaattctctacc

SEQ ID NO: 3182 - RNA, 30 nt, Homo sapiens
  source 1..30: mol_type = unassigned RNA
agtcctaattttaaatatggaaacagaata

SEQ ID NO: 3183 - RNA, 30 nt, Homo sapiens
  source 1..30: mol_type = unassigned RNA
ctcccctcacgattgagtcctaattttaaa

SEQ ID NO: 3184 - RNA, 30 nt, Homo sapiens
  source 1..30: mol_type = unassigned RNA
agatttccatagacctcttctctgccctcc

SEQ ID NO: 3185 - RNA, 30 nt, Homo sapiens
  source 1..30: mol_type = unassigned RNA
tttcagttttatcctgaaattctgaccaaa

SEQ ID NO: 3186 - RNA, 30 nt, Homo sapiens
  source 1..30: mol_type = unassigned RNA
tctccatcccctccccccgtctccacccat

SEQ ID NO: 3187 - RNA, 30 nt, Homo sapiens
  source 1..30: mol_type = unassigned RNA
ttcgacgagacaataccgtaaaatgtgccc

SEQ ID NO: 3188 - RNA, 30 nt, Homo sapiens
  source 1..30: mol_type = unassigned RNA
tatacgatttcatgtcatctctattattat

SEQ ID NO: 3189 - RNA, 30 nt, Homo sapiens
  source 1..30: mol_type = unassigned RNA
atatacgatttcatgtcatctctattatta

SEQ ID NO: 3190 - RNA, 30 nt, Homo sapiens
  source 1..30: mol_type = unassigned RNA
ctttatatacgatttcatgtcatctctatt

SEQ ID NO: 3191 - RNA, 30 nt, Homo sapiens
  source 1..30: mol_type = unassigned RNA
gctttatatacgatttcatgtcatctctat

SEQ ID NO: 3192 - RNA, 30 nt, Homo sapiens
  source 1..30: mol_type = unassigned RNA
tgctttatatacgatttcatgtcatctcta

SEQ ID NO: 3193 - RNA, 30 nt, Homo sapiens
  source 1..30: mol_type = unassigned RNA
acctcttttgctttatatacgatttcatgt

SEQ ID NO: 3194 - RNA, 30 nt, Homo sapiens
  source 1..30: mol_type = unassigned RNA
gacctcttttgctttatatacgatttcatg

SEQ ID NO: 3195 - RNA, 30 nt, Homo sapiens
  source 1..30: mol_type = unassigned RNA
agactttgacctcttttgctttatatacga

SEQ ID NO: 3196 - RNA, 30 nt, Homo sapiens
  source 1..30: mol_type = unassigned RNA
acttaagactttgacctcttttgctttata

SEQ ID NO: 3197 - RNA, 30 nt, Homo sapiens
  source 1..30: mol_type = unassigned RNA
gcgtggcttaacttaagactttgacctctt

SEQ ID NO: 3198 - RNA, 30 nt, Homo sapiens
  source 1..30: mol_type = unassigned RNA
cgcgtggcttaacttaagactttgacctct

SEQ ID NO: 3199 - RNA, 30 nt, Homo sapiens
  source 1..30: mol_type = unassigned RNA
gcactgtctgacccacaaaacggaaatttc

SEQ ID NO: 3200 - RNA, 30 nt, Homo sapiens
  source 1..30: mol_type = unassigned RNA
ggcactgtctgacccacaaaacggaaattt

SEQ ID NO: 3201 - RNA, 30 nt, Homo sapiens
  source 1..30: mol_type = unassigned RNA
ccgatatttggcactgtctgacccacaaaa

SEQ ID NO: 3202 - RNA, 30 nt, Homo sapiens
  source 1..30: mol_type = unassigned RNA
tgaaattgccgatatttggcactgtctgac

SEQ ID NO: 3203 - RNA, 30 nt, Homo sapiens
  source 1..30: mol_type = unassigned RNA
tctctctgagcttatgaaattgccgatatt

SEQ ID NO: 3204 - RNA, 30 nt, Homo sapiens
  source 1..30: mol_type = unassigned RNA
cggtcatcctgtgtctccactgtcttgtct

SEQ ID NO: 3205 - RNA, 30 nt, Homo sapiens
  source 1..30: mol_type = unassigned RNA
ccggtcatcctgtgtctccactgtcttgtc

SEQ ID NO: 3206 - RNA, 30 nt, Homo sapiens
  source 1..30: mol_type = unassigned RNA
tccggtcatcctgtgtctccactgtcttgt

SEQ ID NO: 3207 - RNA, 30 nt, Homo sapiens
  source 1..30: mol_type = unassigned RNA
cggatgaaggccctgaatccagaatctttt

SEQ ID NO: 3208 - RNA, 30 nt, Homo sapiens
  source 1..30: mol_type = unassigned RNA
accccggggccactgagcgccagaaccgtg

SEQ ID NO: 3209 - RNA, 30 nt, Homo sapiens
  source 1..30: mol_type = unassigned RNA
caccccggggccactgagcgccagaaccgt

SEQ ID NO: 3210 - RNA, 30 nt, Homo sapiens
  source 1..30: mol_type = unassigned RNA
tcaccccggggccactgagcgccagaaccg

SEQ ID NO: 3211 - RNA, 30 nt, Homo sapiens
  source 1..30: mol_type = unassigned RNA
cagctgccacaggaccccaggccccaccct

SEQ ID NO: 3212 - RNA, 30 nt, Homo sapiens
  source 1..30: mol_type = unassigned RNA
cctgtctccgcatcctgcaaccaagtcccg

SEQ ID NO: 3213 - RNA, 30 nt, Homo sapiens
  source 1..30: mol_type = unassigned RNA
ccctgtctccgcatcctgcaaccaagtccc

SEQ ID NO: 3214 - RNA, 30 nt, Homo sapiens
  source 1..30: mol_type = unassigned RNA
ggcagctttccctgtctccgcatcctgcaa

SEQ ID NO: 3215 - RNA, 30 nt, Homo sapiens
  source 1..30: mol_type = unassigned RNA
catgtcatctctattattatacatacacat

SEQ ID NO: 3216 - RNA, 30 nt, Homo sapiens
  source 1..30: mol_type = unassigned RNA
atgtcatctctattattatacatacacatg

SEQ ID NO: 3217 - RNA, 30 nt, Homo sapiens
  source 1..30: mol_type = unassigned RNA
ttatacatacacatgtctaggttctagaag

SEQ ID NO: 3218 - RNA, 30 nt, Homo sapiens
  source 1..30: mol_type = unassigned RNA
tacatacacatgtctaggttctagaagctt

SEQ ID NO: 3219 - RNA, 30 nt, Homo sapiens
  source 1..30: mol_type = unassigned RNA
cttcgacgagacaataccgtaaaatgtgcc

SEQ ID NO: 3220 - RNA, 30 nt, Homo sapiens
  source 1..30: mol_type = unassigned RNA
cctccctgcaccgcaccccaggactagcgg

SEQ ID NO: 3221 - RNA, 30 nt, Homo sapiens
  source 1..30: mol_type = unassigned RNA
ccctaaaacaaaggagcggaggtcctaccc

SEQ ID NO: 3222 - RNA, 30 nt, Homo sapiens
  source 1..30: mol_type = unassigned RNA
ccctcccttgccctaaaacaaaggagcgga

SEQ ID NO: 3223 - RNA, 30 nt, Homo sapiens
  source 1..30: mol_type = unassigned RNA
ctctctccttcccctcccttgccctaaaac

SEQ ID NO: 3224 - RNA, 30 nt, Homo sapiens
  source 1..30: mol_type = unassigned RNA
cccgcccctgcagctgcccacccgcgccct

SEQ ID NO: 3225 - RNA, 30 nt, Homo sapiens
  source 1..30: mol_type = unassigned RNA
gaagccgctgtccctccacccctccctgcc

SEQ ID NO: 3226 - RNA, 30 nt, Homo sapiens
  source 1..30: mol_type = unassigned RNA
tgcgcccagcgctgcaggtgcctccccccg

SEQ ID NO: 3227 - RNA, 30 nt, Homo sapiens
  source 1..30: mol_type = unassigned RNA
cgcactgggtggggctgtccgcattgtgcg

SEQ ID NO: 3228 - RNA, 30 nt, Homo sapiens
  source 1..30: mol_type = unassigned RNA
gaatgaagatgcagcaccgggcgggggggc

SEQ ID NO: 3229 - RNA, 30 nt, Homo sapiens
  source 1..30: mol_type = unassigned RNA
cgaatgaagatgcagcaccgggcggggggg

SEQ ID NO: 3230 - RNA, 30 nt, Homo sapiens
  source 1..30: mol_type = unassigned RNA
ggctcctgggtgtcacgctgcgctccccac

SEQ ID NO: 3231 - RNA, 30 nt, Homo sapiens
  source 1..30: mol_type = unassigned RNA
gaagccgcggcggggagtcgggagcgggga

SEQ ID NO: 3232 - RNA, 30 nt, Homo sapiens
  source 1..30: mol_type = unassigned RNA
gacgagacaataccgtaaaatgtgcccagt

SEQ ID NO: 3233 - RNA, 30 nt, Homo sapiens
  source 1..30: mol_type = unassigned RNA
aaagcagaacaatgaggccagcgtggggag

SEQ ID NO: 3234 - RNA, 30 nt, Homo sapiens
  source 1..30: mol_type = unassigned RNA
cccatctctcttaaaagcagaacaatgagg

SEQ ID NO: 3235 - RNA, 30 nt, Homo sapiens
  source 1..30: mol_type = unassigned RNA
tcccatctctcttaaaagcagaacaatgag

SEQ ID NO: 3236 - RNA, 30 nt, Homo sapiens
  source 1..30: mol_type = unassigned RNA
acccacttttcccatctctcttaaaagcag

SEQ ID NO: 3237 - RNA, 30 nt, Homo sapiens
  source 1..30: mol_type = unassigned RNA
cgaaaagaaaaatgttaacccacttttccc

SEQ ID NO: 3238 - RNA, 30 nt, Homo sapiens
  source 1..30: mol_type = unassigned RNA
cttccgaaaagaaaaatgttaacccacttt

SEQ ID NO: 3239 - RNA, 30 nt, Homo sapiens
  source 1..30: mol_type = unassigned RNA
gcttccgaaaagaaaaatgttaacccactt

SEQ ID NO: 3240 - RNA, 30 nt, Homo sapiens
  source 1..30: mol_type = unassigned RNA
tctgtgtctatgtctaaacactctatgtaa

SEQ ID NO: 3241 - RNA, 30 nt, Homo sapiens
  source 1..30: mol_type = unassigned RNA
atctgtgtctatgtctaaacactctatgta

SEQ ID NO: 3242 - RNA, 30 nt, Homo sapiens
  source 1..30: mol_type = unassigned RNA
aaagaaccctttatctgtgtctatgtctaa

SEQ ID NO: 3243 - RNA, 30 nt, Homo sapiens
  source 1..30: mol_type = unassigned RNA
ccgcaaacgatcaaaggtcttcaaagaacc

SEQ ID NO: 3244 - RNA, 30 nt, Homo sapiens
  source 1..30: mol_type = unassigned RNA
cccgcaaacgatcaaaggtcttcaaagaac

SEQ ID NO: 3245 - RNA, 30 nt, Homo sapiens
  source 1..30: mol_type = unassigned RNA
tcccgcaaacgatcaaaggtcttcaaagaa

SEQ ID NO: 3246 - RNA, 30 nt, Homo sapiens
  source 1..30: mol_type = unassigned RNA
tagaagcttttcccgcaaacgatcaaaggt

SEQ ID NO: 3247 - RNA, 30 nt, Homo sapiens
  source 1..30: mol_type = unassigned RNA
ccatctctcttaaaagcagaacaatgaggc

SEQ ID NO: 3248 - RNA, 30 nt, Homo sapiens
  source 1..30: mol_type = unassigned RNA
tgtaaagattaccatagatttaaaaatgtt

SEQ ID NO: 3249 - RNA, 30 nt, Homo sapiens
  source 1..30: mol_type = unassigned RNA
ctttcagttttatcctgaaattctgaccaa

SEQ ID NO: 3250 - RNA, 30 nt, Homo sapiens
  source 1..30: mol_type = unassigned RNA
attgataaactactgccatttctttcagtt

SEQ ID NO: 3251 - RNA, 30 nt, Homo sapiens
  source 1..30: mol_type = unassigned RNA
tactatttatccactacaaaatctcagaag

SEQ ID NO: 3252 - RNA, 30 nt, Homo sapiens
  source 1..30: mol_type = unassigned RNA
ctactatttatccactacaaaatctcagaa

SEQ ID NO: 3253 - RNA, 30 nt, Homo sapiens
  source 1..30: mol_type = unassigned RNA
tctactatttatccactacaaaatctcaga

SEQ ID NO: 3254 - RNA, 30 nt, Homo sapiens
  source 1..30: mol_type = unassigned RNA
ttctactatttatccactacaaaatctcag

SEQ ID NO: 3255 - RNA, 30 nt, Homo sapiens
  source 1..30: mol_type = unassigned RNA
ctactgacatttttctactatttatccact

SEQ ID NO: 3256 - RNA, 30 nt, Homo sapiens
  source 1..30: mol_type = unassigned RNA
ctattactactgacatttttctactattta

SEQ ID NO: 3257 - RNA, 30 nt, Homo sapiens
  source 1..30: mol_type = unassigned RNA
gctattactactgacatttttctactattt

SEQ ID NO: 3258 - RNA, 30 nt, Homo sapiens
  source 1..30: mol_type = unassigned RNA
ggctgctaaataactttgctattactactg

SEQ ID NO: 3259 - RNA, 30 nt, Homo sapiens
  source 1..30: mol_type = unassigned RNA
aaatattcggctgctaaataactttgctat

SEQ ID NO: 3260 - RNA, 30 nt, Homo sapiens
  source 1..30: mol_type = unassigned RNA
agcattaaaatattcggctgctaaataact

SEQ ID NO: 3261 - RNA, 30 nt, Homo sapiens
  source 1..30: mol_type = unassigned RNA
aagcattaaaatattcggctgctaaataac

SEQ ID NO: 3262 - RNA, 30 nt, Homo sapiens
  source 1..30: mol_type = unassigned RNA
taagcattaaaatattcggctgctaaataa

SEQ ID NO: 3263 - RNA, 30 nt, Homo sapiens
  source 1..30: mol_type = unassigned RNA
ttaagcattaaaatattcggctgctaaata

SEQ ID NO: 3264 - RNA, 30 nt, Homo sapiens
  source 1..30: mol_type = unassigned RNA
tttttaagcattaaaatattcggctgctaa

SEQ ID NO: 3265 - RNA, 30 nt, Homo sapiens
  source 1..30: mol_type = unassigned RNA
atttttaagcattaaaatattcggctgcta

SEQ ID NO: 3266 - RNA, 30 nt, Homo sapiens
  source 1..30: mol_type = unassigned RNA
ctttatttttaagcattaaaatattcggct

SEQ ID NO: 3267 - RNA, 30 nt, Homo sapiens
  source 1..30: mol_type = unassigned RNA
ttcctttatttttaagcattaaaatattcg

SEQ ID NO: 3268 - RNA, 30 nt, Homo sapiens
  source 1..30: mol_type = unassigned RNA
attcctttatttttaagcattaaaatattc

SEQ ID NO: 3269 - RNA, 30 nt, Homo sapiens
  source 1..30: mol_type = unassigned RNA
atttattcctttatttttaagcattaaaat

SEQ ID NO: 3270 - RNA, 30 nt, Homo sapiens
  source 1..30: mol_type = unassigned RNA
aatttattcctttatttttaagcattaaaa

SEQ ID NO: 3271 - RNA, 30 nt, Homo sapiens
  source 1..30: mol_type = unassigned RNA
tttaatttattcctttatttttaagcatta

SEQ ID NO: 3272 - RNA, 30 nt, Homo sapiens
  source 1..30: mol_type = unassigned RNA
ctttaatttattcctttatttttaagcatt

SEQ ID NO: 3273 - RNA, 30 nt, Homo sapiens
  source 1..30: mol_type = unassigned RNA
tctttaatttattcctttatttttaagcat

SEQ ID NO: 3274 - RNA, 30 nt, Homo sapiens
  source 1..30: mol_type = unassigned RNA
caatcgatgaagaagtaaacaatgattttc

SEQ ID NO: 3275 - RNA, 30 nt, Homo sapiens
  source 1..30: mol_type = unassigned RNA
agatgtgctctgaacagggggcacatttca

SEQ ID NO: 3276 - RNA, 30 nt, Homo sapiens
  source 1..30: mol_type = unassigned RNA
tctgcaggtggagactctgatattcagatg

SEQ ID NO: 3277 - RNA, 30 nt, Homo sapiens
  source 1..30: mol_type = unassigned RNA
ctcgctaagctgcatgttctctgcaggtgg

SEQ ID NO: 3278 - RNA, 30 nt, Homo sapiens
  source 1..30: mol_type = unassigned RNA
atccactacaaaatctcagaagtaacataa

SEQ ID NO: 3279 - RNA, 30 nt, Homo sapiens
  source 1..30: mol_type = unassigned RNA
actcgctaagctgcatgttctctgcaggtg

SEQ ID NO: 3280 - RNA, 30 nt, Homo sapiens
  source 1..30: mol_type = unassigned RNA
tccactacaaaatctcagaagtaacataaa

SEQ ID NO: 3281 - RNA, 30 nt, Homo sapiens
  source 1..30: mol_type = unassigned RNA
accagggcgtgtatctactttcagattatg

SEQ ID NO: 3282 - RNA, 30 nt, Homo sapiens
  source 1..30: mol_type = unassigned RNA
ccctctagtgtggtgaaaagttaatgcaga

SEQ ID NO: 3283 - RNA, 30 nt, Homo sapiens
  source 1..30: mol_type = unassigned RNA
gagaacatgattgccctctagtgtggtgaa

SEQ ID NO: 3284 - RNA, 30 nt, Homo sapiens
  source 1..30: mol_type = unassigned RNA
agagaacatgattgccctctagtgtggtga

SEQ ID NO: 3285 - RNA, 30 nt, Homo sapiens
  source 1..30: mol_type = unassigned RNA
tagagaacatgattgccctctagtgtggtg

SEQ ID NO: 3286 - RNA, 30 nt, Homo sapiens
  source 1..30: mol_type = unassigned RNA
ttagagaacatgattgccctctagtgtggt

SEQ ID NO: 3287 - RNA, 30 nt, Homo sapiens
  source 1..30: mol_type = unassigned RNA
tttagagaacatgattgccctctagtgtgg

SEQ ID NO: 3288 - RNA, 30 nt, Homo sapiens
  source 1..30: mol_type = unassigned RNA
catcaatcatctgcttttttagagaacatg

SEQ ID NO: 3289 - RNA, 30 nt, Homo sapiens
  source 1..30: mol_type = unassigned RNA
acatcaatcatctgcttttttagagaacat

SEQ ID NO: 3290 - RNA, 30 nt, Homo sapiens
  source 1..30: mol_type = unassigned RNA
gaactaggtttacatcaatcatctgctttt

SEQ ID NO: 3291 - RNA, 30 nt, Homo sapiens
  source 1..30: mol_type = unassigned RNA
ggaactaggtttacatcaatcatctgcttt

SEQ ID NO: 3292 - RNA, 30 nt, Homo sapiens
  source 1..30: mol_type = unassigned RNA
atatttggaactaggtttacatcaatcatc

SEQ ID NO: 3293 - RNA, 30 nt, Homo sapiens
  source 1..30: mol_type = unassigned RNA
aacagttaatatttggaactaggtttacat

SEQ ID NO: 3294 - RNA, 30 nt, Homo sapiens
  source 1..30: mol_type = unassigned RNA
ttaaacagttaatatttggaactaggttta

SEQ ID NO: 3295 - RNA, 30 nt, Homo sapiens
  source 1..30: mol_type = unassigned RNA
attaaacagttaatatttggaactaggttt

SEQ ID NO: 3296 - RNA, 30 nt, Homo sapiens
  source 1..30: mol_type = unassigned RNA
tattaaacagttaatatttggaactaggtt

SEQ ID NO: 3297 - RNA, 30 nt, Homo sapiens
  source 1..30: mol_type = unassigned RNA
ctggtaaaagaaaagattttattaaacagt

SEQ ID NO: 3298 - RNA, 30 nt, Homo sapiens
  source 1..30: mol_type = unassigned RNA
aatgttcctggtaaaagaaaagattttatt

SEQ ID NO: 3299 - RNA, 30 nt, Homo sapiens
  source 1..30: mol_type = unassigned RNA
aataaacacttgaatgttcctggtaaaaga

SEQ ID NO: 3300 - RNA, 30 nt, Homo sapiens
  source 1..30: mol_type = unassigned RNA
ttgaataaacacttgaatgttcctggtaaa

SEQ ID NO: 3301 - RNA, 30 nt, Homo sapiens
  source 1..30: mol_type = unassigned RNA
atccactagggtaaagcatggcatcagctt

SEQ ID NO: 3302 - RNA, 30 nt, Homo sapiens
  source 1..30: mol_type = unassigned RNA
tacaagctctgttcatccactagggtaaag

SEQ ID NO: 3303 - RNA, 30 nt, Homo sapiens
  source 1..30: mol_type = unassigned RNA
aaaattgtacaagctctgttcatccactag

SEQ ID NO: 3304 - RNA, 30 nt, Homo sapiens
  source 1..30: mol_type = unassigned RNA
atcctgtctccttgaaaattgtacaagctc

SEQ ID NO: 3305 - RNA, 30 nt, Homo sapiens
  source 1..30: mol_type = unassigned RNA
catcctgtctccttgaaaattgtacaagct

SEQ ID NO: 3306 - RNA, 30 nt, Homo sapiens
  source 1..30: mol_type = unassigned RNA
tgaccactcatttcatcctgtctccttgaa

SEQ ID NO: 3307 - RNA, 30 nt, Homo sapiens
  source 1..30: mol_type = unassigned RNA
agattatgaccactcatttcatcctgtctc

SEQ ID NO: 3308 - RNA, 30 nt, Homo sapiens
  source 1..30: mol_type = unassigned RNA
cagattatgaccactcatttcatcctgtct

SEQ ID NO: 3309 - RNA, 30 nt, Homo sapiens
  source 1..30: mol_type = unassigned RNA
taataacaatgtaataaaactgagaagtaa

SEQ ID NO: 3310 - RNA, 30 nt, Homo sapiens
  source 1..30: mol_type = unassigned RNA
tactcgctaagctgcatgttctctgcaggt

SEQ ID NO: 3311 - RNA, 30 nt, Homo sapiens
  source 1..30: mol_type = unassigned RNA
gtacacctcctcagtatcacatacctgcct

SEQ ID NO: 3312 - RNA, 30 nt, Homo sapiens
  source 1..30: mol_type = unassigned RNA
ggtacacctcctcagtatcacatacctgcc

SEQ ID NO: 3313 - RNA, 30 nt, Homo sapiens
  source 1..30: mol_type = unassigned RNA
cataaaatgtaatcaaaaaataattctatc

SEQ ID NO: 3314 - RNA, 30 nt, Homo sapiens
  source 1..30: mol_type = unassigned RNA
gaattacataaaatgtaatcaaaaaataat

SEQ ID NO: 3315 - RNA, 30 nt, Homo sapiens
  source 1..30: mol_type = unassigned RNA
tagctggattagaattacataaaatgtaat

SEQ ID NO: 3316 - RNA, 30 nt, Homo sapiens
  source 1..30: mol_type = unassigned RNA
atagctggattagaattacataaaatgtaa

SEQ ID NO: 3317 - RNA, 30 nt, Homo sapiens
  source 1..30: mol_type = unassigned RNA
tatagctggattagaattacataaaatgta

SEQ ID NO: 3318 - RNA, 30 nt, Homo sapiens
  source 1..30: mol_type = unassigned RNA
aatattttatagctggattagaattacata

SEQ ID NO: 3319 - RNA, 30 nt, Homo sapiens
  source 1..30: mol_type = unassigned RNA
aggaacacagtaatatgacactattaaata

SEQ ID NO: 3320 - RNA, 30 nt, Homo sapiens
  source 1..30: mol_type = unassigned RNA
gaggaacacagtaatatgacactattaaat

SEQ ID NO: 3321 - RNA, 30 nt, Homo sapiens
  source 1..30: mol_type = unassigned RNA
atatgcacatcaaagtttgaggaacacagt

SEQ ID NO: 3322 - RNA, 30 nt, Homo sapiens
  source 1..30: mol_type = unassigned RNA
atgaaaatcaaaggtaattcatatgcacat

SEQ ID NO: 3323 - RNA, 30 nt, Homo sapiens
  source 1..30: mol_type = unassigned RNA
aatgaaaatcaaaggtaattcatatgcaca

SEQ ID NO: 3324 - RNA, 30 nt, Homo sapiens
  source 1..30: mol_type = unassigned RNA
taatgaaaatcaaaggtaattcatatgcac

SEQ ID NO: 3325 - RNA, 30 nt, Homo sapiens
  source 1..30: mol_type = unassigned RNA
cattttaatgaaaatcaaaggtaattcata

SEQ ID NO: 3326 - RNA, 30 nt, Homo sapiens
  source 1..30: mol_type = unassigned RNA
gcattttaatgaaaatcaaaggtaattcat

SEQ ID NO: 3327 - RNA, 30 nt, Homo sapiens
  source 1..30: mol_type = unassigned RNA
aatcagaatttgcattttaatgaaaatcaa

SEQ ID NO: 3328 - RNA, 30 nt, Homo sapiens
  source 1..30: mol_type = unassigned RNA
ggaagacagaatgtctgcctcaagccagat

SEQ ID NO: 3329 - RNA, 30 nt, Homo sapiens
  source 1..30: mol_type = unassigned RNA
ttcggaagacagaatgtctgcctcaagcca

SEQ ID NO: 3330 - RNA, 30 nt, Homo sapiens
  source 1..30: mol_type = unassigned RNA
gtggtcagaatcagcatcatctgggagctt

SEQ ID NO: 3331 - RNA, 30 nt, Homo sapiens
  source 1..30: mol_type = unassigned RNA
agtggtcagaatcagcatcatctgggagct

SEQ ID NO: 3332 - RNA, 30 nt, Homo sapiens
  source 1..30: mol_type = unassigned RNA
atatccctaaaactgatgtgtttagtggtc

SEQ ID NO: 3333 - RNA, 30 nt, Homo sapiens
  source 1..30: mol_type = unassigned RNA
caagttaatatccctaaaactgatgtgttt

SEQ ID NO: 3334 - RNA, 30 nt, Homo sapiens
  source 1..30: mol_type = unassigned RNA
ccaggagggatacctgtatattacaagtta

SEQ ID NO: 3335 - RNA, 30 nt, Homo sapiens
  source 1..30: mol_type = unassigned RNA
agacataataccagagcttaccaggaggga

SEQ ID NO: 3336 - RNA, 30 nt, Homo sapiens
  source 1..30: mol_type = unassigned RNA
aaaatgttaagacataataccagagcttac

SEQ ID NO: 3337 - RNA, 30 nt, Homo sapiens
  source 1..30: mol_type = unassigned RNA
aaaaatgttaagacataataccagagctta

SEQ ID NO: 3338 - RNA, 30 nt, Homo sapiens
  source 1..30: mol_type = unassigned RNA
ccatagatttaaaaatgttaagacataata

SEQ ID NO: 3339 - RNA, 30 nt, Homo sapiens
  source 1..30: mol_type = unassigned RNA
taaagattaccatagatttaaaaatgttaa

SEQ ID NO: 3340 - RNA, 30 nt, Homo sapiens
  source 1..30: mol_type = unassigned RNA
tatcaatgcatatttaaaaaatccactttt

SEQ ID NO: 3341 - RNA, 30 nt, Homo sapiens
  source 1..30: mol_type = unassigned RNA
aaaaaatccacttttgatgatacccaaaat

SEQ ID NO: 3342 - RNA, 30 nt, Homo sapiens
  source 1..30: mol_type = unassigned RNA
aaaaatccacttttgatgatacccaaaatt

SEQ ID NO: 3343 - RNA, 30 nt, Homo sapiens
  source 1..30: mol_type = unassigned RNA
tgatgatacccaaaattagtttatacttat

SEQ ID NO: 3344 - RNA, 30 nt, Homo sapiens
  source 1..30: mol_type = unassigned RNA
tggtacacctcctcagtatcacatacctgc

SEQ ID NO: 3345 - RNA, 30 nt, Homo sapiens
  source 1..30: mol_type = unassigned RNA
ttggtacacctcctcagtatcacatacctg

SEQ ID NO: 3346 - RNA, 30 nt, Homo sapiens
  source 1..30: mol_type = unassigned RNA
gaagatgggaaaaataacagcagtcagttt

SEQ ID NO: 3347 - RNA, 30 nt, Homo sapiens
  source 1..30: mol_type = unassigned RNA
aatggaaaagaaagacagacttagaagatg

SEQ ID NO: 3348 - RNA, 30 nt, Homo sapiens
  source 1..30: mol_type = unassigned RNA
aaatggaaaagaaagacagacttagaagat

SEQ ID NO: 3349 - RNA, 30 nt, Homo sapiens
  source 1..30: mol_type = unassigned RNA
aaaaggtatctttaaatggaaaagaaagac

SEQ ID NO: 3350 - RNA, 30 nt, Homo sapiens
  source 1..30: mol_type = unassigned RNA
aaaaaggtatctttaaatggaaaagaaaga

SEQ ID NO: 3351 - RNA, 30 nt, Homo sapiens
  source 1..30: mol_type = unassigned RNA
gatttaaaaaggtatctttaaatggaaaag

SEQ ID NO: 3352 - RNA, 30 nt, Homo sapiens
  source 1..30: mol_type = unassigned RNA
gattagatttaaaaaggtatctttaaatgg

SEQ ID NO: 3353 - RNA, 30 nt, Homo sapiens
  source 1..30: mol_type = unassigned RNA
aaatcacattggattagatttaaaaaggta

SEQ ID NO: 3354 - RNA, 30 nt, Homo sapiens
  source 1..30: mol_type = unassigned RNA
aaatctgataaaactagattgaaatcacat

SEQ ID NO: 3355 - RNA, 30 nt, Homo sapiens
  source 1..30: mol_type = unassigned RNA
ttgaaatctgataaaactagattgaaatca

SEQ ID NO: 3356 - RNA, 30 nt, Homo sapiens
  source 1..30: mol_type = unassigned RNA
taataaacagaaaaccactacaaggagatg

SEQ ID NO: 3357 - RNA, 30 nt, Homo sapiens
  source 1..30: mol_type = unassigned RNA
atgcagacaccgaggttttccaatggacag

SEQ ID NO: 3358 - RNA, 30 nt, Homo sapiens
  source 1..30: mol_type = unassigned RNA
ctaataaacagaaaaccactacaaggagat

SEQ ID NO: 3359 - RNA, 30 nt, Homo sapiens
  source 1..30: mol_type = unassigned RNA
acatcgattttctaataaacagaaaaccac

SEQ ID NO: 3360 - RNA, 30 nt, Homo sapiens
  source 1..30: mol_type = unassigned RNA
aaattaacatcgattttctaataaacagaa

SEQ ID NO: 3361 - RNA, 30 nt, Homo sapiens
  source 1..30: mol_type = unassigned RNA
gttaaaattaacatcgattttctaataaac

SEQ ID NO: 3362 - RNA, 30 nt, Homo sapiens
  source 1..30: mol_type = unassigned RNA
cttcgttaaaattaacatcgattttctaat

SEQ ID NO: 3363 - RNA, 30 nt, Homo sapiens
  source 1..30: mol_type = unassigned RNA
ttacttcgttaaaattaacatcgattttct

SEQ ID NO: 3364 - RNA, 30 nt, Homo sapiens
  source 1..30: mol_type = unassigned RNA
ttcttacttcgttaaaattaacatcgattt

SEQ ID NO: 3365 - RNA, 30 nt, Homo sapiens
  source 1..30: mol_type = unassigned RNA
cttcttacttcgttaaaattaacatcgatt

SEQ ID NO: 3366 - RNA, 30 nt, Homo sapiens
  source 1..30: mol_type = unassigned RNA
tatatttcttcttacttcgttaaaattaac

SEQ ID NO: 3367 - RNA, 30 nt, Homo sapiens
  source 1..30: mol_type = unassigned RNA
tacttatatatttcttcttacttcgttaaa

SEQ ID NO: 3368 - RNA, 30 nt, Homo sapiens
  source 1..30: mol_type = unassigned RNA
atacttatatatttcttcttacttcgttaa

SEQ ID NO: 3369 - RNA, 30 nt, Homo sapiens
  source 1..30: mol_type = unassigned RNA
gtttatacttatatatttcttcttacttcg

SEQ ID NO: 3370 - RNA, 30 nt, Homo sapiens
  source 1..30: mol_type = unassigned RNA
atgatacccaaaattagtttatacttatat

SEQ ID NO: 3371 - RNA, 30 nt, Homo sapiens
  source 1..30: mol_type = unassigned RNA
gatgatacccaaaattagtttatacttata

SEQ ID NO: 3372 - RNA, 30 nt, Homo sapiens
  source 1..30: mol_type = unassigned RNA
tctaataaacagaaaaccactacaaggaga

SEQ ID NO: 3373 - RNA, 30 nt, Homo sapiens
  source 1..30: mol_type = unassigned RNA
tccaatggacagaaccagtctaggttctga

SEQ ID NO: 3374 - RNA, 30 nt, Homo sapiens
  source 1..30: mol_type = unassigned RNA
ccaatggacagaaccagtctaggttctgaa

SEQ ID NO: 3375 - RNA, 30 nt, Homo sapiens
  source 1..30: mol_type = unassigned RNA
caatggacagaaccagtctaggttctgaaa

SEQ ID NO: 3376 - RNA, 30 nt, Homo sapiens
  source 1..30: mol_type = unassigned RNA
agaatagaataatttactacaaatctgtaa

SEQ ID NO: 3377 - RNA, 30 nt, Homo sapiens
  source 1..30: mol_type = unassigned RNA
tagaatagaataatttactacaaatctgta

SEQ ID NO: 3378 - RNA, 30 nt, Homo sapiens
  source 1..30: mol_type = unassigned RNA
tcttttagaatagaataatttactacaaat

SEQ ID NO: 3379 - RNA, 30 nt, Homo sapiens
  source 1..30: mol_type = unassigned RNA
ctcttttagaatagaataatttactacaaa

SEQ ID NO: 3380 - RNA, 30 nt, Homo sapiens
  source 1..30: mol_type = unassigned RNA
atgaggtaatagctgtaacaataaaaacac

SEQ ID NO: 3381 - RNA, 30 nt, Homo sapiens
  source 1..30: mol_type = unassigned RNA
ctaaaaatattaatgaggtaatagctgtaa

SEQ ID NO: 3382 - RNA, 30 nt, Homo sapiens
  source 1..30: mol_type = unassigned RNA
gctaaaaatattaatgaggtaatagctgta

SEQ ID NO: 3383 - RNA, 30 nt, Homo sapiens
  source 1..30: mol_type = unassigned RNA
aatgcaacaaataaaagtttgctaaaaata

SEQ ID NO: 3384 - RNA, 30 nt, Homo sapiens
  source 1..30: mol_type = unassigned RNA
caatgcaacaaataaaagtttgctaaaaat

SEQ ID NO: 3385 - RNA, 30 nt, Homo sapiens
  source 1..30: mol_type = unassigned RNA
aaactgctttcaatgcaacaaataaaagtt

SEQ ID NO: 3386 - RNA, 30 nt, Homo sapiens
  source 1..30: mol_type = unassigned RNA
aaaaataaaaacccaaagtaattaaaactg

SEQ ID NO: 3387 - RNA, 30 nt, Homo sapiens
  source 1..30: mol_type = unassigned RNA
gaaaaataaaaacccaaagtaattaaaact

SEQ ID NO: 3388 - RNA, 30 nt, Homo sapiens
  source 1..30: mol_type = unassigned RNA
gtaatttgaaaaataaaaacccaaagtaat

SEQ ID NO: 3389 - RNA, 30 nt, Homo sapiens
  source 1..30: mol_type = unassigned RNA
caccatctatccattagtaatttgaaaaat

SEQ ID NO: 3390 - RNA, 30 nt, Homo sapiens
  source 1..30: mol_type = unassigned RNA
ttccaccatctatccattagtaatttgaaa

SEQ ID NO: 3391 - RNA, 30 nt, Homo sapiens
  source 1..30: mol_type = unassigned RNA
aatgcttattccaccatctatccattagta

SEQ ID NO: 3392 - RNA, 30 nt, Homo sapiens
  source 1..30: mol_type = unassigned RNA
tgccaaatgattaaatgcttattccaccat

SEQ ID NO: 3393 - RNA, 30 nt, Homo sapiens
  source 1..30: mol_type = unassigned RNA
atggaagtcatattgtgccaaatgattaaa

SEQ ID NO: 3394 - RNA, 30 nt, Homo sapiens
  source 1..30: mol_type = unassigned RNA
gatggaagtcatattgtgccaaatgattaa

SEQ ID NO: 3395 - RNA, 30 nt, Homo sapiens
  source 1..30: mol_type = unassigned RNA
atcactgagaatgagctatttgatggaagt

SEQ ID NO: 3396 - RNA, 30 nt, Homo sapiens
  source 1..30: mol_type = unassigned RNA
aatcactgagaatgagctatttgatggaag

SEQ ID NO: 3397 - RNA, 30 nt, Homo sapiens
  source 1..30: mol_type = unassigned RNA
taatcactgagaatgagctatttgatggaa

SEQ ID NO: 3398 - RNA, 30 nt, Homo sapiens
  source 1..30: mol_type = unassigned RNA
ttaatcactgagaatgagctatttgatgga

SEQ ID NO: 3399 - RNA, 30 nt, Homo sapiens
  source 1..30: mol_type = unassigned RNA
tttaatcactgagaatgagctatttgatgg

SEQ ID NO: 3400 - RNA, 30 nt, Homo sapiens
  source 1..30: mol_type = unassigned RNA
tagcattttttaatcactgagaatgagcta

SEQ ID NO: 3401 - RNA, 30 nt, Homo sapiens
  source 1..30: mol_type = unassigned RNA
tagcctcttgtagcattttttaatcactga

SEQ ID NO: 3402 - RNA, 30 nt, Homo sapiens
  source 1..30: mol_type = unassigned RNA
ctgaatctgagtaaattgtagcctcttgta

SEQ ID NO: 3403 - RNA, 30 nt, Homo sapiens
  source 1..30: mol_type = unassigned RNA
gaatagaataatttactacaaatctgtaag

SEQ ID NO: 3404 - RNA, 30 nt, Homo sapiens
  source 1..30: mol_type = unassigned RNA
actacaaatctgtaagtcacattattgtaa

SEQ ID NO: 3405 - RNA, 30 nt, Homo sapiens
  source 1..30: mol_type = unassigned RNA
ctacaaatctgtaagtcacattattgtaaa

SEQ ID NO: 3406 - RNA, 30 nt, Homo sapiens
  source 1..30: mol_type = unassigned RNA
ttgtaaaaaaaaaccattgtgaattttgac

SEQ ID NO: 3407 - RNA, 30 nt, Homo sapiens
  source 1..30: mol_type = unassigned RNA
ctcacctggtataaactaaatacatgagat

SEQ ID NO: 3408 - RNA, 30 nt, Homo sapiens
  source 1..30: mol_type = unassigned RNA
caggctcagcttactcacctggtataaact

SEQ ID NO: 3409 - RNA, 30 nt, Homo sapiens
  source 1..30: mol_type = unassigned RNA
ttgcaggctcagcttactcacctggtataa

SEQ ID NO: 3410 - RNA, 30 nt, Homo sapiens
  source 1..30: mol_type = unassigned RNA
attgcaggctcagcttactcacctggtata

SEQ ID NO: 3411 - RNA, 30 nt, Homo sapiens
  source 1..30: mol_type = unassigned RNA
cactgggacagagagtgtttattgcaggct

SEQ ID NO: 3412 - RNA, 30 nt, Homo sapiens
  source 1..30: mol_type = unassigned RNA
tagctacctgcgacgtgttacactgggaca

SEQ ID NO: 3413 - RNA, 30 nt, Homo sapiens
  source 1..30: mol_type = unassigned RNA
tcctatcattctagctacctgcgacgtgtt

SEQ ID NO: 3414 - RNA, 30 nt, Homo sapiens
  source 1..30: mol_type = unassigned RNA
atcctatcattctagctacctgcgacgtgt

SEQ ID NO: 3415 - RNA, 30 nt, Homo sapiens
  source 1..30: mol_type = unassigned RNA
atttatcctatcattctagctacctgcgac

SEQ ID NO: 3416 - RNA, 30 nt, Homo sapiens
  source 1..30: mol_type = unassigned RNA
acgtgcatagacaaacaccacaaggtctat

SEQ ID NO: 3417 - RNA, 30 nt, Homo sapiens
  source 1..30: mol_type = unassigned RNA
aacgtgcatagacaaacaccacaaggtcta

SEQ ID NO: 3418 - RNA, 30 nt, Homo sapiens
  source 1..30: mol_type = unassigned RNA
taacgtgcatagacaaacaccacaaggtct

SEQ ID NO: 3419 - RNA, 30 nt, Homo sapiens
  source 1..30: mol_type = unassigned RNA
tctcagagaattttaacgtgcatagacaaa

SEQ ID NO: 3420 - RNA, 30 nt, Homo sapiens
  source 1..30: mol_type = unassigned RNA
cctgaatctgagtaaattgtagcctcttgt

SEQ ID NO: 3421 - RNA, 30 nt, Homo sapiens
  source 1..30: mol_type = unassigned RNA
ctctcagagaattttaacgtgcatagacaa

SEQ ID NO: 3422 - RNA, 30 nt, Homo sapiens
  source 1..30: mol_type = unassigned RNA
aaaatatactttctctcagagaattttaac

SEQ ID NO: 3423 - RNA, 30 nt, Homo sapiens
  source 1..30: mol_type = unassigned RNA
taaaatatactttctctcagagaattttaa

SEQ ID NO: 3424 - RNA, 30 nt, Homo sapiens
  source 1..30: mol_type = unassigned RNA
tcattttaaaatatactttctctcagagaa

SEQ ID NO: 3425 - RNA, 30 nt, Homo sapiens
  source 1..30: mol_type = unassigned RNA
attatcattttaaaatatactttctctcag

SEQ ID NO: 3426 - RNA, 30 nt, Homo sapiens
  source 1..30: mol_type = unassigned RNA
atagcacaaatgtccaatcttaattatcat

SEQ ID NO: 3427 - RNA, 30 nt, Homo sapiens
  source 1..30: mol_type = unassigned RNA
aatagcacaaatgtccaatcttaattatca

SEQ ID NO: 3428 - RNA, 30 nt, Homo sapiens
  source 1..30: mol_type = unassigned RNA
taatagcacaaatgtccaatcttaattatc

SEQ ID NO: 3429 - RNA, 30 nt, Homo sapiens
  source 1..30: mol_type = unassigned RNA
tagattttaatagcacaaatgtccaatctt

SEQ ID NO: 3430 - RNA, 30 nt, Homo sapiens
  source 1..30: mol_type = unassigned RNA
actaaagttgtagattttaatagcacaaat

SEQ ID NO: 3431 - RNA, 30 nt, Homo sapiens
  source 1..30: mol_type = unassigned RNA
gactaaagttgtagattttaatagcacaaa

SEQ ID NO: 3432 - RNA, 30 nt, Homo sapiens
  source 1..30: mol_type = unassigned RNA
tgactaaagttgtagattttaatagcacaa

SEQ ID NO: 3433 - RNA, 30 nt, Homo sapiens
  source 1..30: mol_type = unassigned RNA
tgaattttgactaaagttgtagattttaat

SEQ ID NO: 3434 - RNA, 30 nt, Homo sapiens
  source 1..30: mol_type = unassigned RNA
taaaaaaaaaccattgtgaattttgactaa

SEQ ID NO: 3435 - RNA, 30 nt, Homo sapiens
  source 1..30: mol_type = unassigned RNA
aaatatactttctctcagagaattttaacg

SEQ ID NO: 3436 - RNA, 30 nt, Homo sapiens
  source 1..30: mol_type = unassigned RNA
ataaactactgccatttctttcagttttat

SEQ ID NO: 3437 - RNA, 30 nt, Homo sapiens
  source 1..30: mol_type = unassigned RNA
tggcactctgaaaggacatttcctgaatct

SEQ ID NO: 3438 - RNA, 30 nt, Homo sapiens
  source 1..30: mol_type = unassigned RNA
ttatatgaatcagccttatggcactctgaa

SEQ ID NO: 3439 - RNA, 30 nt, Homo sapiens
  source 1..30: mol_type = unassigned RNA
tttcagcctcctgtgagcaatgagctacca

SEQ ID NO: 3440 - RNA, 30 nt, Homo sapiens
  source 1..30: mol_type = unassigned RNA
ctcctgctcggaggccagcttttttcagcc

SEQ ID NO: 3441 - RNA, 30 nt, Homo sapiens
  source 1..30: mol_type = unassigned RNA
tgctctgagcttcctcctgctcggaggcca

SEQ ID NO: 3442 - RNA, 30 nt, Homo sapiens
  source 1..30: mol_type = unassigned RNA
gtgctctgagcttcctcctgctcggaggcc

SEQ ID NO: 3443 - RNA, 30 nt, Homo sapiens
  source 1..30: mol_type = unassigned RNA
gctatcagcagctcccagtggccacgccca

SEQ ID NO: 3444 - RNA, 30 nt, Homo sapiens
  source 1..30: mol_type = unassigned RNA
ccacgaccaaaaaagaaactggtgtgagct

SEQ ID NO: 3445 - RNA, 30 nt, Homo sapiens
  source 1..30: mol_type = unassigned RNA
ttcccacgaccaaaaaagaaactggtgtga

SEQ ID NO: 3446 - RNA, 30 nt, Homo sapiens
  source 1..30: mol_type = unassigned RNA
cttcccacgaccaaaaaagaaactggtgtg

SEQ ID NO: 3447 - RNA, 30 nt, Homo sapiens
  source 1..30: mol_type = unassigned RNA
tcttcccacgaccaaaaaagaaactggtgt

SEQ ID NO: 3448 - RNA, 30 nt, Homo sapiens
  source 1..30: mol_type = unassigned RNA
ttcttcccacgaccaaaaaagaaactggtg

SEQ ID NO: 3449 - RNA, 30 nt, Homo sapiens
  source 1..30: mol_type = unassigned RNA
tgacaacaggataatatgtgtttttcttcc

SEQ ID NO: 3450 - RNA, 30 nt, Homo sapiens
  source 1..30: mol_type = unassigned RNA
atataaggtcacagatcttgtgacaacagg

SEQ ID NO: 3451 - RNA, 30 nt, Homo sapiens
  source 1..30: mol_type = unassigned RNA
catataaggtcacagatcttgtgacaacag

SEQ ID NO: 3452 - RNA, 30 nt, Homo sapiens
  source 1..30: mol_type = unassigned RNA
tcatataaggtcacagatcttgtgacaaca

SEQ ID NO: 3453 - RNA, 30 nt, Homo sapiens
  source 1..30: mol_type = unassigned RNA
ttcatataaggtcacagatcttgtgacaac

SEQ ID NO: 3454 - RNA, 30 nt, Homo sapiens
  source 1..30: mol_type = unassigned RNA
tttcatataaggtcacagatcttgtgacaa

SEQ ID NO: 3455 - RNA, 30 nt, Homo sapiens
  source 1..30: mol_type = unassigned RNA
tagcattttttcatataaggtcacagatct

SEQ ID NO: 3456 - RNA, 30 nt, Homo sapiens
  source 1..30: mol_type = unassigned RNA
atgaaaaaattctagcattttttcatataa

SEQ ID NO: 3457 - RNA, 30 nt, Homo sapiens
  source 1..30: mol_type = unassigned RNA
aatgaaaaaattctagcattttttcatata

SEQ ID NO: 3458 - RNA, 30 nt, Homo sapiens
  source 1..30: mol_type = unassigned RNA
taatgaaaaaattctagcattttttcatat

SEQ ID NO: 3459 - RNA, 30 nt, Homo sapiens
  source 1..30: mol_type = unassigned RNA
ttaatgaaaaaattctagcattttttcata

SEQ ID NO: 3460 - RNA, 30 nt, Homo sapiens
  source 1..30: mol_type = unassigned RNA
tttaatgaaaaaattctagcattttttcat

SEQ ID NO: 3461 - RNA, 30 nt, Homo sapiens
  source 1..30: mol_type = unassigned RNA
ttttttaatgaaaaaattctagcatttttt

SEQ ID NO: 3462 - RNA, 30 nt, Homo sapiens
  source 1..30: mol_type = unassigned RNA
cttttttaatgaaaaaattctagcattttt

SEQ ID NO: 3463 - RNA, 30 nt, Homo sapiens
  source 1..30: mol_type = unassigned RNA
tcttttttaatgaaaaaattctagcatttt

SEQ ID NO: 3464 - RNA, 30 nt, Homo sapiens
  source 1..30: mol_type = unassigned RNA
agtattttcttttttaatgaaaaaattcta

SEQ ID NO: 3465 - RNA, 30 nt, Homo sapiens
  source 1..30: mol_type = unassigned RNA
tgaaaacatctgggtcactggctagttcag

SEQ ID NO: 3466 - RNA, 30 nt, Homo sapiens
  source 1..30: mol_type = unassigned RNA
ttcagcctcctgtgagcaatgagctaccaa

SEQ ID NO: 3467 - RNA, 30 nt, Homo sapiens
  source 1..30: mol_type = unassigned RNA
tcagcctcctgtgagcaatgagctaccaag

SEQ ID NO: 3468 - RNA, 30 nt, Homo sapiens
  source 1..30: mol_type = unassigned RNA
cagcctcctgtgagcaatgagctaccaagg

SEQ ID NO: 3469 - RNA, 30 nt, Homo sapiens
  source 1..30: mol_type = unassigned RNA
agcctcctgtgagcaatgagctaccaaggt

SEQ ID NO: 3470 - RNA, 30 nt, Homo sapiens
  source 1..30: mol_type = unassigned RNA
attatatgaatcagccttatggcactctga

SEQ ID NO: 3471 - RNA, 30 nt, Homo sapiens
  source 1..30: mol_type = unassigned RNA
tattatatgaatcagccttatggcactctg

SEQ ID NO: 3472 - RNA, 30 nt, Homo sapiens
  source 1..30: mol_type = unassigned RNA
tagggaagaaaactattttattatatgaat

SEQ ID NO: 3473 - RNA, 30 nt, Homo sapiens
  source 1..30: mol_type = unassigned RNA
aattatagggaagaaaactattttattata

SEQ ID NO: 3474 - RNA, 30 nt, Homo sapiens
  source 1..30: mol_type = unassigned RNA
atcttaaattatagggaagaaaactatttt

SEQ ID NO: 3475 - RNA, 30 nt, Homo sapiens
  source 1..30: mol_type = unassigned RNA
gatcttaaattatagggaagaaaactattt

SEQ ID NO: 3476 - RNA, 30 nt, Homo sapiens
  source 1..30: mol_type = unassigned RNA
acagaactaagtaactatttgatcttaaat

SEQ ID NO: 3477 - RNA, 30 nt, Homo sapiens
  source 1..30: mol_type = unassigned RNA
atagctactgctaggtattcacagaactaa

SEQ ID NO: 3478 - RNA, 30 nt, Homo sapiens
  source 1..30: mol_type = unassigned RNA
gatagctactgctaggtattcacagaacta

SEQ ID NO: 3479 - RNA, 30 nt, Homo sapiens
  source 1..30: mol_type = unassigned RNA
tgtttgatagctactgctaggtattcacag

SEQ ID NO: 3480 - RNA, 30 nt, Homo sapiens
  source 1..30: mol_type = unassigned RNA
aaattctgtttgatagctactgctaggtat

SEQ ID NO: 3481 - RNA, 30 nt, Homo sapiens
  source 1..30: mol_type = unassigned RNA
aaaattctgtttgatagctactgctaggta

SEQ ID NO: 3482 - RNA, 30 nt, Homo sapiens
  source 1..30: mol_type = unassigned RNA
actttaaaattctgtttgatagctactgct

SEQ ID NO: 3483 - RNA, 30 nt, Homo sapiens
  source 1..30: mol_type = unassigned RNA
tatgaatcagccttatggcactctgaaagg

SEQ ID NO: 3484 - RNA, 30 nt, Homo sapiens
  source 1..30: mol_type = unassigned RNA
aactttaaaattctgtttgatagctactgc

SEQ ID NO: 3485 - RNA, 30 nt, Homo sapiens
  source 1..30: mol_type = unassigned RNA
gttgtacagatttaactttaaaattctgtt

SEQ ID NO: 3486 - RNA, 30 nt, Homo sapiens
  source 1..30: mol_type = unassigned RNA
ttagttgtacagatttaactttaaaattct

SEQ ID NO: 3487 - RNA, 30 nt, Homo sapiens
  source 1..30: mol_type = unassigned RNA
attgttagttgtacagatttaactttaaaa

SEQ ID NO: 3488 - RNA, 30 nt, Homo sapiens
  source 1..30: mol_type = unassigned RNA
atcctccacttcattgttagttgtacagat

SEQ ID NO: 3489 - RNA, 30 nt, Homo sapiens
  source 1..30: mol_type = unassigned RNA
aatatgtatcgattcatcctccacttcatt

SEQ ID NO: 3490 - RNA, 30 nt, Homo sapiens
  source 1..30: mol_type = unassigned RNA
cattcaatatgtatcgattcatcctccact

SEQ ID NO: 3491 - RNA, 30 nt, Homo sapiens
  source 1..30: mol_type = unassigned RNA
tcaatgacaaagtcttccattcaatatgta

SEQ ID NO: 3492 - RNA, 30 nt, Homo sapiens
  source 1..30: mol_type = unassigned RNA
atcaatgacaaagtcttccattcaatatgt

SEQ ID NO: 3493 - RNA, 30 nt, Homo sapiens
  source 1..30: mol_type = unassigned RNA
ctaaagatggcctgaatttatcaatgacaa

SEQ ID NO: 3494 - RNA, 30 nt, Homo sapiens
  source 1..30: mol_type = unassigned RNA
cctaaagatggcctgaatttatcaatgaca

SEQ ID NO: 3495 - RNA, 30 nt, Homo sapiens
  source 1..30: mol_type = unassigned RNA
tcctaaagatggcctgaatttatcaatgac

SEQ ID NO: 3496 - RNA, 30 nt, Homo sapiens
  source 1..30: mol_type = unassigned RNA
ataaatccggaattttcctaaagatggcct

SEQ ID NO: 3497 - RNA, 30 nt, Homo sapiens
  source 1..30: mol_type = unassigned RNA
aagtaaaaaataatggtgattgataaatcc

SEQ ID NO: 3498 - RNA, 30 nt, Homo sapiens
  source 1..30: mol_type = unassigned RNA
tacagatttaactttaaaattctgtttgat

SEQ ID NO: 3499 - RNA, 30 nt, Homo sapiens
  source 1..30: mol_type = unassigned RNA
ctcacccttggtggatttagtcttttgcag

SEQ ID NO: 3500 - RNA, 30 nt, Homo sapiens
  source 1..30: mol_type = unassigned RNA
aatcgatgaagaagtaaacaatgattttct

SEQ ID NO: 3501 - RNA, 30 nt, Homo sapiens
  source 1..30: mol_type = unassigned RNA
tgaagcctgtgccaggtattatgagaacaa

SEQ ID NO: 3502 - RNA, 30 nt, Homo sapiens
  source 1..30: mol_type = unassigned RNA
cttagttctgtgaatacctagcagtagcta

SEQ ID NO: 3503 - RNA, 30 nt, Homo sapiens
  source 1..30: mol_type = unassigned RNA
agatcaaatagttacttagttctgtgaata

SEQ ID NO: 3504 - RNA, 30 nt, Homo sapiens
  source 1..30: mol_type = unassigned RNA
aagatcaaatagttacttagttctgtgaat

SEQ ID NO: 3505 - RNA, 30 nt, Homo sapiens
  source 1..30: mol_type = unassigned RNA
cctataatttaagatcaaatagttacttag

SEQ ID NO: 3506 - RNA, 30 nt, Homo sapiens
  source 1..30: mol_type = unassigned RNA
ttccctataatttaagatcaaatagttact

SEQ ID NO: 3507 - RNA, 30 nt, Homo sapiens
  source 1..30: mol_type = unassigned RNA
cttccctataatttaagatcaaatagttac

SEQ ID NO: 3508 - RNA, 30 nt, Homo sapiens
  source 1..30: mol_type = unassigned RNA
tcttccctataatttaagatcaaatagtta

SEQ ID NO: 3509 - RNA, 30 nt, Homo sapiens
  source 1..30: mol_type = unassigned RNA
atataataaaatagttttcttccctataat

SEQ ID NO: 3510 - RNA, 30 nt, Homo sapiens
  source 1..30: mol_type = unassigned RNA
agagtgccataaggctgattcatataataa

SEQ ID NO: 3511 - RNA, 30 nt, Homo sapiens
  source 1..30: mol_type = unassigned RNA
cagagtgccataaggctgattcatataata

SEQ ID NO: 3512 - RNA, 30 nt, Homo sapiens
  source 1..30: mol_type = unassigned RNA
aggaaatgtcctttcagagtgccataaggc

SEQ ID NO: 3513 - RNA, 30 nt, Homo sapiens
  source 1..30: mol_type = unassigned RNA
ctcagattcaggaaatgtcctttcagagtg

SEQ ID NO: 3514 - RNA, 30 nt, Homo sapiens
  source 1..30: mol_type = unassigned RNA
actcagattcaggaaatgtcctttcagagt

SEQ ID NO: 3515 - RNA, 30 nt, Homo sapiens
  source 1..30: mol_type = unassigned RNA
aaaaatgctacaagaggctacaatttactc

SEQ ID NO: 3516 - RNA, 30 nt, Homo sapiens
  source 1..30: mol_type = unassigned RNA
tcagtgattaaaaaatgctacaagaggcta

SEQ ID NO: 3517 - RNA, 30 nt, Homo sapiens
  source 1..30: mol_type = unassigned RNA
catcaaatagctcattctcagtgattaaaa

SEQ ID NO: 3518 - RNA, 30 nt, Homo sapiens
  source 1..30: mol_type = unassigned RNA
gcacaatatgacttccatcaaatagctcat

SEQ ID NO: 3519 - RNA, 30 nt, Homo sapiens
  source 1..30: mol_type = unassigned RNA
ggcacaatatgacttccatcaaatagctca

SEQ ID NO: 3520 - RNA, 30 nt, Homo sapiens
  source 1..30: mol_type = unassigned RNA
atcatttggcacaatatgacttccatcaaa

SEQ ID NO: 3521 - RNA, 30 nt, Homo sapiens
  source 1..30: mol_type = unassigned RNA
aatcatttggcacaatatgacttccatcaa

SEQ ID NO: 3522 - RNA, 30 nt, Homo sapiens
  source 1..30: mol_type = unassigned RNA
ctaatggatagatggtggaataagcattta

SEQ ID NO: 3523 - RNA, 30 nt, Homo sapiens
  source 1..30: mol_type = unassigned RNA
aaattactaatggatagatggtggaataag

SEQ ID NO: 3524 - RNA, 30 nt, Homo sapiens
  source 1..30: mol_type = unassigned RNA
caaattactaatggatagatggtggaataa

SEQ ID NO: 3525 - RNA, 30 nt, Homo sapiens
  source 1..30: mol_type = unassigned RNA
tcaaattactaatggatagatggtggaata

SEQ ID NO: 3526 - RNA, 30 nt, Homo sapiens
  source 1..30: mol_type = unassigned RNA
ttcaaattactaatggatagatggtggaat

SEQ ID NO: 3527 - RNA, 30 nt, Homo sapiens
  source 1..30: mol_type = unassigned RNA
tttttcaaattactaatggatagatggtgg

SEQ ID NO: 3528 - RNA, 30 nt, Homo sapiens
  source 1..30: mol_type = unassigned RNA
atttttcaaattactaatggatagatggtg

SEQ ID NO: 3529 - RNA, 30 nt, Homo sapiens
  source 1..30: mol_type = unassigned RNA
gttctgtgaatacctagcagtagctatcaa

SEQ ID NO: 3530 - RNA, 30 nt, Homo sapiens
  source 1..30: mol_type = unassigned RNA
tatttttcaaattactaatggatagatggt

SEQ ID NO: 3531 - RNA, 30 nt, Homo sapiens
  source 1..30: mol_type = unassigned RNA
tgtgaatacctagcagtagctatcaaacag

SEQ ID NO: 3532 - RNA, 30 nt, Homo sapiens
  source 1..30: mol_type = unassigned RNA
aaagttaaatctgtacaactaacaatgaag

SEQ ID NO: 3533 - RNA, 30 nt, Homo sapiens
  source 1..30: mol_type = unassigned RNA
ggtcgtgggaagaaaaacacatattatcct

SEQ ID NO: 3534 - RNA, 30 nt, Homo sapiens
  source 1..30: mol_type = unassigned RNA
tggtcgtgggaagaaaaacacatattatcc

SEQ ID NO: 3535 - RNA, 30 nt, Homo sapiens
  source 1..30: mol_type = unassigned RNA
ttggtcgtgggaagaaaaacacatattatc

SEQ ID NO: 3536 - RNA, 30 nt, Homo sapiens
  source 1..30: mol_type = unassigned RNA
tttggtcgtgggaagaaaaacacatattat

SEQ ID NO: 3537 - RNA, 30 nt, Homo sapiens
  source 1..30: mol_type = unassigned RNA
ttttttggtcgtgggaagaaaaacacatat

SEQ ID NO: 3538 - RNA, 30 nt, Homo sapiens
  source 1..30: mol_type = unassigned RNA
cttttttggtcgtgggaagaaaaacacata

SEQ ID NO: 3539 - RNA, 30 nt, Homo sapiens
  source 1..30: mol_type = unassigned RNA
ctcacaggaggctgaaaaaagctggcctcc

SEQ ID NO: 3540 - RNA, 30 nt, Homo sapiens
  source 1..30: mol_type = unassigned RNA
gtagctcattgctcacaggaggctgaaaaa

SEQ ID NO: 3541 - RNA, 30 nt, Homo sapiens
  source 1..30: mol_type = unassigned RNA
aactgagtgtgactgatcacatgctcaggc

SEQ ID NO: 3542 - RNA, 30 nt, Homo sapiens
  source 1..30: mol_type = unassigned RNA
cttcaactgagtgtgactgatcacatgctc

SEQ ID NO: 3543 - RNA, 30 nt, Homo sapiens
  source 1..30: mol_type = unassigned RNA
acttcaactgagtgtgactgatcacatgct

SEQ ID NO: 3544 - RNA, 30 nt, Homo sapiens
  source 1..30: mol_type = unassigned RNA
tacttcaactgagtgtgactgatcacatgc

SEQ ID NO: 3545 - RNA, 30 nt, Homo sapiens
  source 1..30: mol_type = unassigned RNA
ttacttcaactgagtgtgactgatcacatg

SEQ ID NO: 3546 - RNA, 30 nt, Homo sapiens
  source 1..30: mol_type = unassigned RNA
tttacttcaactgagtgtgactgatcacat

SEQ ID NO: 3547 - RNA, 30 nt, Homo sapiens
  source 1..30: mol_type = unassigned RNA
ttttttacttcaactgagtgtgactgatca

SEQ ID NO: 3548 - RNA, 30 nt, Homo sapiens
  source 1..30: mol_type = unassigned RNA
tcaatcaccattattttttacttcaactga

SEQ ID NO: 3549 - RNA, 30 nt, Homo sapiens
  source 1..30: mol_type = unassigned RNA
atcaatcaccattattttttacttcaactg

SEQ ID NO: 3550 - RNA, 30 nt, Homo sapiens
  source 1..30: mol_type = unassigned RNA
cggatttatcaatcaccattattttttact

SEQ ID NO: 3551 - RNA, 30 nt, Homo sapiens
  source 1..30: mol_type = unassigned RNA
ggaaaattccggatttatcaatcaccatta

SEQ ID NO: 3552 - RNA, 30 nt, Homo sapiens
  source 1..30: mol_type = unassigned RNA
aggaaaattccggatttatcaatcaccatt

SEQ ID NO: 3553 - RNA, 30 nt, Homo sapiens
  source 1..30: mol_type = unassigned RNA
aggccatctttaggaaaattccggatttat

SEQ ID NO: 3554 - RNA, 30 nt, Homo sapiens
  source 1..30: mol_type = unassigned RNA
ataaattcaggccatctttaggaaaattcc

SEQ ID NO: 3555 - RNA, 30 nt, Homo sapiens
  source 1..30: mol_type = unassigned RNA
tcattgataaattcaggccatctttaggaa

SEQ ID NO: 3556 - RNA, 30 nt, Homo sapiens
  source 1..30: mol_type = unassigned RNA
gtcattgataaattcaggccatctttagga

SEQ ID NO: 3557 - RNA, 30 nt, Homo sapiens
  source 1..30: mol_type = unassigned RNA
aatggaagactttgtcattgataaattcag

SEQ ID NO: 3558 - RNA, 30 nt, Homo sapiens
  source 1..30: mol_type = unassigned RNA
aatctgtacaactaacaatgaagtggagga

SEQ ID NO: 3559 - RNA, 30 nt, Homo sapiens
  source 1..30: mol_type = unassigned RNA
aagttaaatctgtacaactaacaatgaagt

SEQ ID NO: 3560 - RNA, 30 nt, Homo sapiens
  source 1..30: mol_type = unassigned RNA
taaagttaaatctgtacaactaacaatgaa

SEQ ID NO: 3561 - RNA, 30 nt, Homo sapiens
  source 1..30: mol_type = unassigned RNA
ttatttttcaaattactaatggatagatgg

SEQ ID NO: 3562 - RNA, 30 nt, Homo sapiens
  source 1..30: mol_type = unassigned RNA
ggtttttatttttcaaattactaatggata

SEQ ID NO: 3563 - RNA, 30 nt, Homo sapiens
  source 1..30: mol_type = unassigned RNA
gggtttttatttttcaaattactaatggat

SEQ ID NO: 3564 - RNA, 30 nt, Homo sapiens
  source 1..30: mol_type = unassigned RNA
ttacaataatgtgacttacagatttgtagt

SEQ ID NO: 3565 - RNA, 30 nt, Homo sapiens
  source 1..30: mol_type = unassigned RNA
tttacaataatgtgacttacagatttgtag

SEQ ID NO: 3566 - RNA, 30 nt, Homo sapiens
  source 1..30: mol_type = unassigned RNA
ttttacaataatgtgacttacagatttgta

SEQ ID NO: 3567 - RNA, 30 nt, Homo sapiens
  source 1..30: mol_type = unassigned RNA
tttttacaataatgtgacttacagatttgt

SEQ ID NO: 3568 - RNA, 30 nt, Homo sapiens
  source 1..30: mol_type = unassigned RNA
ttttttacaataatgtgacttacagatttg

SEQ ID NO: 3569 - RNA, 30 nt, Homo sapiens
  source 1..30: mol_type = unassigned RNA
acaatggtttttttttacaataatgtgact

SEQ ID NO: 3570 - RNA, 30 nt, Homo sapiens
  source 1..30: mol_type = unassigned RNA
gtcaaaattcacaatggtttttttttacaa

SEQ ID NO: 3571 - RNA, 30 nt, Homo sapiens
  source 1..30: mol_type = unassigned RNA
agtcaaaattcacaatggtttttttttaca

SEQ ID NO: 3572 - RNA, 30 nt, Homo sapiens
  source 1..30: mol_type = unassigned RNA
aaatctacaactttagtcaaaattcacaat

SEQ ID NO: 3573 - RNA, 30 nt, Homo sapiens
  source 1..30: mol_type = unassigned RNA
tgctattaaaatctacaactttagtcaaaa

SEQ ID NO: 3574 - RNA, 30 nt, Homo sapiens
  source 1..30: mol_type = unassigned RNA
gtgctattaaaatctacaactttagtcaaa

SEQ ID NO: 3575 - RNA, 30 nt, Homo sapiens
  source 1..30: mol_type = unassigned RNA
gacatttgtgctattaaaatctacaacttt

SEQ ID NO: 3576 - RNA, 30 nt, Homo sapiens
  source 1..30: mol_type = unassigned RNA
agattggacatttgtgctattaaaatctac

SEQ ID NO: 3577 - RNA, 30 nt, Homo sapiens
  source 1..30: mol_type = unassigned RNA
aaatgataattaagattggacatttgtgct

SEQ ID NO: 3578 - RNA, 30 nt, Homo sapiens
  source 1..30: mol_type = unassigned RNA
aaaatgataattaagattggacatttgtgc

SEQ ID NO: 3579 - RNA, 30 nt, Homo sapiens
  source 1..30: mol_type = unassigned RNA
taaaatgataattaagattggacatttgtg

SEQ ID NO: 3580 - RNA, 30 nt, Homo sapiens
  source 1..30: mol_type = unassigned RNA
tctgagagaaagtatattttaaaatgataa

SEQ ID NO: 3581 - RNA, 30 nt, Homo sapiens
  source 1..30: mol_type = unassigned RNA
aaattctctgagagaaagtatattttaaaa

SEQ ID NO: 3582 - RNA, 30 nt, Homo sapiens
  source 1..30: mol_type = unassigned RNA
tctatgcacgttaaaattctctgagagaaa

SEQ ID NO: 3583 - RNA, 30 nt, Homo sapiens
  source 1..30: mol_type = unassigned RNA
gtctatgcacgttaaaattctctgagagaa

SEQ ID NO: 3584 - RNA, 30 nt, Homo sapiens
  source 1..30: mol_type = unassigned RNA
tggtgtttgtctatgcacgttaaaattctc

SEQ ID NO: 3585 - RNA, 30 nt, Homo sapiens
  source 1..30: mol_type = unassigned RNA
atagaccttgtggtgtttgtctatgcacgt

SEQ ID NO: 3586 - RNA, 30 nt, Homo sapiens
  source 1..30: mol_type = unassigned RNA
taccaggtgagtaagctgagcctgcaataa

SEQ ID NO: 3587 - RNA, 30 nt, Homo sapiens
  source 1..30: mol_type = unassigned RNA
ataccaggtgagtaagctgagcctgcaata

SEQ ID NO: 3588 - RNA, 30 nt, Homo sapiens
  source 1..30: mol_type = unassigned RNA
gtttataccaggtgagtaagctgagcctgc

SEQ ID NO: 3589 - RNA, 30 nt, Homo sapiens
  source 1..30: mol_type = unassigned RNA
agtttataccaggtgagtaagctgagcctg

SEQ ID NO: 3590 - RNA, 30 nt, Homo sapiens
  source 1..30: mol_type = unassigned RNA
atctcatgtatttagtttataccaggtgag

SEQ ID NO: 3591 - RNA, 30 nt, Homo sapiens
  source 1..30: mol_type = unassigned RNA
tacaataatgtgacttacagatttgtagta

SEQ ID NO: 3592 - RNA, 30 nt, Homo sapiens
  source 1..30: mol_type = unassigned RNA
acaataatgtgacttacagatttgtagtaa

SEQ ID NO: 3593 - RNA, 30 nt, Homo sapiens
  source 1..30: mol_type = unassigned RNA
caataatgtgacttacagatttgtagtaaa

SEQ ID NO: 3594 - RNA, 30 nt, Homo sapiens
  source 1..30: mol_type = unassigned RNA
cagatttgtagtaaattattctattctaaa

SEQ ID NO: 3595 - RNA, 30 nt, Homo sapiens
  source 1..30: mol_type = unassigned RNA
ctttgggtttttatttttcaaattactaat

SEQ ID NO: 3596 - RNA, 30 nt, Homo sapiens
  source 1..30: mol_type = unassigned RNA
attactttgggtttttatttttcaaattac

SEQ ID NO: 3597 - RNA, 30 nt, Homo sapiens
  source 1..30: mol_type = unassigned RNA
aattactttgggtttttatttttcaaatta

SEQ ID NO: 3598 - RNA, 30 nt, Homo sapiens
  source 1..30: mol_type = unassigned RNA
taattactttgggtttttatttttcaaatt

SEQ ID NO: 3599 - RNA, 30 nt, Homo sapiens
  source 1..30: mol_type = unassigned RNA
aaagcagttttaattactttgggtttttat

SEQ ID NO: 3600 - RNA, 30 nt, Homo sapiens
  source 1..30: mol_type = unassigned RNA
cattgaaagcagttttaattactttgggtt

SEQ ID NO: 3601 - RNA, 30 nt, Homo sapiens
  source 1..30: mol_type = unassigned RNA
ttgcattgaaagcagttttaattactttgg

SEQ ID NO: 3602 - RNA, 30 nt, Homo sapiens
  source 1..30: mol_type = unassigned RNA
gttgcattgaaagcagttttaattactttg

SEQ ID NO: 3603 - RNA, 30 nt, Homo sapiens
  source 1..30: mol_type = unassigned RNA
tttgttgcattgaaagcagttttaattact

SEQ ID NO: 3604 - RNA, 30 nt, Homo sapiens
  source 1..30: mol_type = unassigned RNA
atttgttgcattgaaagcagttttaattac

SEQ ID NO: 3605 - RNA, 30 nt, Homo sapiens
  source 1..30: mol_type = unassigned RNA
tatttgttgcattgaaagcagttttaatta

SEQ ID NO: 3606 - RNA, 30 nt, Homo sapiens
  source 1..30: mol_type = unassigned RNA
gcaaacttttatttgttgcattgaaagcag

SEQ ID NO: 3607 - RNA, 30 nt, Homo sapiens
  source 1..30: mol_type = unassigned RNA
agcaaacttttatttgttgcattgaaagca

SEQ ID NO: 3608 - RNA, 30 nt, Homo sapiens
  source 1..30: mol_type = unassigned RNA
gtcgtgggaagaaaaacacatattatcctg

SEQ ID NO: 3609 - RNA, 30 nt, Homo sapiens
  source 1..30: mol_type = unassigned RNA
tagcaaacttttatttgttgcattgaaagc

SEQ ID NO: 3610 - RNA, 30 nt, Homo sapiens
  source 1..30: mol_type = unassigned RNA
atatttttagcaaacttttatttgttgcat

SEQ ID NO: 3611 - RNA, 30 nt, Homo sapiens
  source 1..30: mol_type = unassigned RNA
cctcattaatatttttagcaaacttttatt

SEQ ID NO: 3612 - RNA, 30 nt, Homo sapiens
  source 1..30: mol_type = unassigned RNA
cagctattacctcattaatatttttagcaa

SEQ ID NO: 3613 - RNA, 30 nt, Homo sapiens
  source 1..30: mol_type = unassigned RNA
ttacagctattacctcattaatatttttag

SEQ ID NO: 3614 - RNA, 30 nt, Homo sapiens
  source 1..30: mol_type = unassigned RNA
ttgttacagctattacctcattaatatttt

SEQ ID NO: 3615 - RNA, 30 nt, Homo sapiens
  source 1..30: mol_type = unassigned RNA
attgttacagctattacctcattaatattt

SEQ ID NO: 3616 - RNA, 30 nt, Homo sapiens
  source 1..30: mol_type = unassigned RNA
tattgttacagctattacctcattaatatt

SEQ ID NO: 3617 - RNA, 30 nt, Homo sapiens
  source 1..30: mol_type = unassigned RNA
ttattgttacagctattacctcattaatat

SEQ ID NO: 3618 - RNA, 30 nt, Homo sapiens
  source 1..30: mol_type = unassigned RNA
taaaagagaaatgagtgtttttattgttac

SEQ ID NO: 3619 - RNA, 30 nt, Homo sapiens
  source 1..30: mol_type = unassigned RNA
tattctaaaagagaaatgagtgtttttatt

SEQ ID NO: 3620 - RNA, 30 nt, Homo sapiens
  source 1..30: mol_type = unassigned RNA
ttctattctaaaagagaaatgagtgttttt

SEQ ID NO: 3621 - RNA, 30 nt, Homo sapiens
  source 1..30: mol_type = unassigned RNA
tagtaaattattctattctaaaagagaaat

SEQ ID NO: 3622 - RNA, 30 nt, Homo sapiens
  source 1..30: mol_type = unassigned RNA
gtagtaaattattctattctaaaagagaaa

SEQ ID NO: 3623 - RNA, 30 nt, Homo sapiens
  source 1..30: mol_type = unassigned RNA
ttagcaaacttttatttgttgcattgaaag

SEQ ID NO: 3624 - RNA, 30 nt, Homo sapiens
  source 1..30: mol_type = unassigned RNA
tcctgttgtcacaagatctgtgaccttata

SEQ ID NO: 3625 - RNA, 30 nt, Homo sapiens
  source 1..30: mol_type = unassigned RNA
tcacaagatctgtgaccttatatgaaaaaa

SEQ ID NO: 3626 - RNA, 30 nt, Homo sapiens
  source 1..30: mol_type = unassigned RNA
tatgaaaaaatgctagaattttttcattaa

SEQ ID NO: 3627 - RNA, 30 nt, Homo sapiens
  source 1..30: mol_type = unassigned RNA
aaatctaatccaatgtgatttcaatctagt

SEQ ID NO: 3628 - RNA, 30 nt, Homo sapiens
  source 1..30: mol_type = unassigned RNA
taaatctaatccaatgtgatttcaatctag

SEQ ID NO: 3629 - RNA, 30 nt, Homo sapiens
  source 1..30: mol_type = unassigned RNA
ttaaatctaatccaatgtgatttcaatcta

SEQ ID NO: 3630 - RNA, 30 nt, Homo sapiens
  source 1..30: mol_type = unassigned RNA
aagatacctttttaaatctaatccaatgtg

SEQ ID NO: 3631 - RNA, 30 nt, Homo sapiens
  source 1..30: mol_type = unassigned RNA
aaagatacctttttaaatctaatccaatgt

SEQ ID NO: 3632 - RNA, 30 nt, Homo sapiens
  source 1..30: mol_type = unassigned RNA
catttaaagatacctttttaaatctaatcc

SEQ ID NO: 3633 - RNA, 30 nt, Homo sapiens
  source 1..30: mol_type = unassigned RNA
ccatttaaagatacctttttaaatctaatc

SEQ ID NO: 3634 - RNA, 30 nt, Homo sapiens
  source 1..30: mol_type = unassigned RNA
tccatttaaagatacctttttaaatctaat

SEQ ID NO: 3635 - RNA, 30 nt, Homo sapiens
  source 1..30: mol_type = unassigned RNA
ttttccatttaaagatacctttttaaatct

SEQ ID NO: 3636 - RNA, 30 nt, Homo sapiens
  source 1..30: mol_type = unassigned RNA
cttttccatttaaagatacctttttaaatc

SEQ ID NO: 3637 - RNA, 30 nt, Homo sapiens
  source 1..30: mol_type = unassigned RNA
taagtctgtctttcttttccatttaaagat

SEQ ID NO: 3638 - RNA, 30 nt, Homo sapiens
  source 1..30: mol_type = unassigned RNA
ccatcttctaagtctgtctttcttttccat

SEQ ID NO: 3639 - RNA, 30 nt, Homo sapiens
  source 1..30: mol_type = unassigned RNA
cccatcttctaagtctgtctttcttttcca

SEQ ID NO: 3640 - RNA, 30 nt, Homo sapiens
  source 1..30: mol_type = unassigned RNA
tcccatcttctaagtctgtctttcttttcc

SEQ ID NO: 3641 - RNA, 30 nt, Homo sapiens
  source 1..30: mol_type = unassigned RNA
ttcccatcttctaagtctgtctttcttttc

SEQ ID NO: 3642 - RNA, 30 nt, Homo sapiens
  source 1..30: mol_type = unassigned RNA
tttttcccatcttctaagtctgtctttctt

SEQ ID NO: 3643 - RNA, 30 nt, Homo sapiens
  source 1..30: mol_type = unassigned RNA
gcgagtaaaacaggcaggtatgtgatactg

SEQ ID NO: 3644 - RNA, 30 nt, Homo sapiens
  source 1..30: mol_type = unassigned RNA
agagcacatctgaatatcagagtctccacc

SEQ ID NO: 3645 - RNA, 30 nt, Homo sapiens
  source 1..30: mol_type = unassigned RNA
aaatgtgccccctgttcagagcacatctga

SEQ ID NO: 3646 - RNA, 30 nt, Homo sapiens
  source 1..30: mol_type = unassigned RNA
atcgattgaaatgtgccccctgttcagagc

SEQ ID NO: 3647 - RNA, 30 nt, Homo sapiens
  source 1..30: mol_type = unassigned RNA
ttcatcgattgaaatgtgccccctgttcag

SEQ ID NO: 3648 - RNA, 30 nt, Homo sapiens
  source 1..30: mol_type = unassigned RNA
cttcttcatcgattgaaatgtgccccctgt

SEQ ID NO: 3649 - RNA, 30 nt, Homo sapiens
  source 1..30: mol_type = unassigned RNA
acttcttcatcgattgaaatgtgccccctg

SEQ ID NO: 3650 - RNA, 30 nt, Homo sapiens
  source 1..30: mol_type = unassigned RNA
tttacttcttcatcgattgaaatgtgcccc

SEQ ID NO: 3651 - RNA, 30 nt, Homo sapiens
  source 1..30: mol_type = unassigned RNA
aagaaaatcattgtttacttcttcatcgat

SEQ ID NO: 3652 - RNA, 30 nt, Homo sapiens
  source 1..30: mol_type = unassigned RNA
aaaataaaggaataaattaaagaaaatcat

SEQ ID NO: 3653 - RNA, 30 nt, Homo sapiens
  source 1..30: mol_type = unassigned RNA
atgcttaaaaataaaggaataaattaaaga

SEQ ID NO: 3654 - RNA, 30 nt, Homo sapiens
  source 1..30: mol_type = unassigned RNA
aatctaatccaatgtgatttcaatctagtt

SEQ ID NO: 3655 - RNA, 30 nt, Homo sapiens
  source 1..30: mol_type = unassigned RNA
caatctagttttatcagatttcaacaatta

SEQ ID NO: 3656 - RNA, 30 nt, Homo sapiens
  source 1..30: mol_type = unassigned RNA
aatctagttttatcagatttcaacaattat

SEQ ID NO: 3657 - RNA, 30 nt, Homo sapiens
  source 1..30: mol_type = unassigned RNA
tatcagatttcaacaattattgagcatctc

SEQ ID NO: 3658 - RNA, 30 nt, Homo sapiens
  source 1..30: mol_type = unassigned RNA
tttgattacattttatgtaattctaatcca

SEQ ID NO: 3659 - RNA, 30 nt, Homo sapiens
  source 1..30: mol_type = unassigned RNA
ttttttgattacattttatgtaattctaat

SEQ ID NO: 3660 - RNA, 30 nt, Homo sapiens
  source 1..30: mol_type = unassigned RNA
atagaattattttttgattacattttatgt

SEQ ID NO: 3661 - RNA, 30 nt, Homo sapiens
  source 1..30: mol_type = unassigned RNA
aatatgcattgatagaattattttttgatt

SEQ ID NO: 3662 - RNA, 30 nt, Homo sapiens
  source 1..30: mol_type = unassigned RNA
aaatatgcattgatagaattattttttgat

SEQ ID NO: 3663 - RNA, 30 nt, Homo sapiens
  source 1..30: mol_type = unassigned RNA
taaatatgcattgatagaattattttttga

SEQ ID NO: 3664 - RNA, 30 nt, Homo sapiens
  source 1..30: mol_type = unassigned RNA
ttaaatatgcattgatagaattattttttg

SEQ ID NO: 3665 - RNA, 30 nt, Homo sapiens
  source 1..30: mol_type = unassigned RNA
tttaaatatgcattgatagaattatttttt

SEQ ID NO: 3666 - RNA, 30 nt, Homo sapiens
  source 1..30: mol_type = unassigned RNA
ggtatcatcaaaagtggattttttaaatat

SEQ ID NO: 3667 - RNA, 30 nt, Homo sapiens
  source 1..30: mol_type = unassigned RNA
gggtatcatcaaaagtggattttttaaata

SEQ ID NO: 3668 - RNA, 30 nt, Homo sapiens
  source 1..30: mol_type = unassigned RNA
tgggtatcatcaaaagtggattttttaaat

SEQ ID NO: 3669 - RNA, 30 nt, Homo sapiens
  source 1..30: mol_type = unassigned RNA
acgaagtaagaagaaatatataagtataaa

SEQ ID NO: 3670 - RNA, 30 nt, Homo sapiens
  source 1..30: mol_type = unassigned RNA
aacgaagtaagaagaaatatataagtataa

SEQ ID NO: 3671 - RNA, 30 nt, Homo sapiens
  source 1..30: mol_type = unassigned RNA
aatgcttaaaaataaaggaataaattaaag

SEQ ID NO: 3672 - RNA, 30 nt, Homo sapiens
  source 1..30: mol_type = unassigned RNA
taacgaagtaagaagaaatatataagtata

SEQ ID NO: 3673 - RNA, 30 nt, Homo sapiens
  source 1..30: mol_type = unassigned RNA
gaaaatcgatgttaattttaacgaagtaag

SEQ ID NO: 3674 - RNA, 30 nt, Homo sapiens
  source 1..30: mol_type = unassigned RNA
ttagaaaatcgatgttaattttaacgaagt

SEQ ID NO: 3675 - RNA, 30 nt, Homo sapiens
  source 1..30: mol_type = unassigned RNA
attagaaaatcgatgttaattttaacgaag

SEQ ID NO: 3676 - RNA, 30 nt, Homo sapiens
  source 1..30: mol_type = unassigned RNA
tgtttattagaaaatcgatgttaattttaa

SEQ ID NO: 3677 - RNA, 30 nt, Homo sapiens
  source 1..30: mol_type = unassigned RNA
ctgtttattagaaaatcgatgttaatttta

SEQ ID NO: 3678 - RNA, 30 nt, Homo sapiens
  source 1..30: mol_type = unassigned RNA
tctgtttattagaaaatcgatgttaatttt

SEQ ID NO: 3679 - RNA, 30 nt, Homo sapiens
  source 1..30: mol_type = unassigned RNA
tagtggttttctgtttattagaaaatcgat

SEQ ID NO: 3680 - RNA, 30 nt, Homo sapiens
  source 1..30: mol_type = unassigned RNA
agcatctccttgtagtggttttctgtttat

SEQ ID NO: 3681 - RNA, 30 nt, Homo sapiens
  source 1..30: mol_type = unassigned RNA
ttgagcatctccttgtagtggttttctgtt

SEQ ID NO: 3682 - RNA, 30 nt, Homo sapiens
  source 1..30: mol_type = unassigned RNA
aacaattattgagcatctccttgtagtggt

SEQ ID NO: 3683 - RNA, 30 nt, Homo sapiens
  source 1..30: mol_type = unassigned RNA
caacaattattgagcatctccttgtagtgg

SEQ ID NO: 3684 - RNA, 30 nt, Homo sapiens
  source 1..30: mol_type = unassigned RNA
tcagatttcaacaattattgagcatctcct

SEQ ID NO: 3685 - RNA, 30 nt, Homo sapiens
  source 1..30: mol_type = unassigned RNA
atcagatttcaacaattattgagcatctcc

SEQ ID NO: 3686 - RNA, 30 nt, Homo sapiens
  source 1..30: mol_type = unassigned RNA
attttaacgaagtaagaagaaatatataag

SEQ ID NO: 3687 - RNA, 30 nt, Homo sapiens
  source 1..30: mol_type = unassigned RNA
tcaattaatctcatgtatttagtttatacc

SEQ ID NO: 3688 - RNA, 30 nt, Homo sapiens
  source 1..30: mol_type = unassigned RNA
taatgcttaaaaataaaggaataaattaaa

SEQ ID NO: 3689 - RNA, 30 nt, Homo sapiens
  source 1..30: mol_type = unassigned RNA
agcagccgaatattttaatgcttaaaaata

SEQ ID NO: 3690 - RNA, 30 nt, Homo sapiens
  source 1..30: mol_type = unassigned RNA
ccaggaacattcaagtgtttattcaataag

SEQ ID NO: 3691 - RNA, 30 nt, Homo sapiens
  source 1..30: mol_type = unassigned RNA
accaggaacattcaagtgtttattcaataa

SEQ ID NO: 3692 - RNA, 30 nt, Homo sapiens
  source 1..30: mol_type = unassigned RNA
taccaggaacattcaagtgtttattcaata

SEQ ID NO: 3693 - RNA, 30 nt, Homo sapiens
  source 1..30: mol_type = unassigned RNA
ttttaccaggaacattcaagtgtttattca

SEQ ID NO: 3694 - RNA, 30 nt, Homo sapiens
  source 1..30: mol_type = unassigned RNA
cttttaccaggaacattcaagtgtttattc

SEQ ID NO: 3695 - RNA, 30 nt, Homo sapiens
  source 1..30: mol_type = unassigned RNA
tcttttaccaggaacattcaagtgtttatt

SEQ ID NO: 3696 - RNA, 30 nt, Homo sapiens
  source 1..30: mol_type = unassigned RNA
ataaaatcttttcttttaccaggaacattc

SEQ ID NO: 3697 - RNA, 30 nt, Homo sapiens
  source 1..30: mol_type = unassigned RNA
aataaaatcttttcttttaccaggaacatt

SEQ ID NO: 3698 - RNA, 30 nt, Homo sapiens
  source 1..30: mol_type = unassigned RNA
actgtttaataaaatcttttcttttaccag

SEQ ID NO: 3699 - RNA, 30 nt, Homo sapiens
  source 1..30: mol_type = unassigned RNA
caaatattaactgtttaataaaatcttttc

SEQ ID NO: 3700 - RNA, 30 nt, Homo sapiens
  source 1..30: mol_type = unassigned RNA
atgtaaacctagttccaaatattaactgtt

SEQ ID NO: 3701 - RNA, 30 nt, Homo sapiens
  source 1..30: mol_type = unassigned RNA
tctaaaaaagcagatgattgatgtaaacct

SEQ ID NO: 3702 - RNA, 30 nt, Homo sapiens
  source 1..30: mol_type = unassigned RNA
accacactagagggcaatcatgttctctaa

SEQ ID NO: 3703 - RNA, 30 nt, Homo sapiens
  source 1..30: mol_type = unassigned RNA
caccacactagagggcaatcatgttctcta

SEQ ID NO: 3704 - RNA, 30 nt, Homo sapiens
  source 1..30: mol_type = unassigned RNA
tcaccacactagagggcaatcatgttctct

SEQ ID NO: 3705 - RNA, 30 nt, Homo sapiens
  source 1..30: mol_type = unassigned RNA
acttttcaccacactagagggcaatcatgt

SEQ ID NO: 3706 - RNA, 30 nt, Homo sapiens
  source 1..30: mol_type = unassigned RNA
gaaaacctcggtgtctgcattaacttttca

SEQ ID NO: 3707 - RNA, 30 nt, Homo sapiens
  source 1..30: mol_type = unassigned RNA
tgtccattggaaaacctcggtgtctgcatt

SEQ ID NO: 3708 - RNA, 30 nt, Homo sapiens
  source 1..30: mol_type = unassigned RNA
agaacctagactggttctgtccattggaaa

SEQ ID NO: 3709 - RNA, 30 nt, Homo sapiens
  source 1..30: mol_type = unassigned RNA
cagaacctagactggttctgtccattggaa

SEQ ID NO: 3710 - RNA, 30 nt, Homo sapiens
  source 1..30: mol_type = unassigned RNA
tcagaacctagactggttctgtccattgga

SEQ ID NO: 3711 - RNA, 30 nt, Homo sapiens
  source 1..30: mol_type = unassigned RNA
aaaaagaaaatactgaactagccagtgacc

SEQ ID NO: 3712 - RNA, 30 nt, Homo sapiens
  source 1..30: mol_type = unassigned RNA
attaaaaaagaaaatactgaactagccagt

SEQ ID NO: 3713 - RNA, 30 nt, Homo sapiens
  source 1..30: mol_type = unassigned RNA
cattaaaaaagaaaatactgaactagccag

SEQ ID NO: 3714 - RNA, 30 nt, Homo sapiens
  source 1..30: mol_type = unassigned RNA
tcattaaaaaagaaaatactgaactagcca

SEQ ID NO: 3715 - RNA, 30 nt, Homo sapiens
  source 1..30: mol_type = unassigned RNA
ttcattaaaaaagaaaatactgaactagcc

SEQ ID NO: 3716 - RNA, 30 nt, Homo sapiens
  source 1..30: mol_type = unassigned RNA
tttcattaaaaaagaaaatactgaactagc

SEQ ID NO: 3717 - RNA, 30 nt, Homo sapiens
  source 1..30: mol_type = unassigned RNA
aagtgtttattcaataagctgatgccatgc

SEQ ID NO: 3718 - RNA, 30 nt, Homo sapiens
  source 1..30: mol_type = unassigned RNA
attcaataagctgatgccatgctttaccct

SEQ ID NO: 3719 - RNA, 30 nt, Homo sapiens
  source 1..30: mol_type = unassigned RNA
ttcaataagctgatgccatgctttacccta

SEQ ID NO: 3720 - RNA, 30 nt, Homo sapiens
  source 1..30: mol_type = unassigned RNA
aataagctgatgccatgctttaccctagtg

SEQ ID NO: 3721 - RNA, 30 nt, Homo sapiens
  source 1..30: mol_type = unassigned RNA
tttagcagccgaatattttaatgcttaaaa

SEQ ID NO: 3722 - RNA, 30 nt, Homo sapiens
  source 1..30: mol_type = unassigned RNA
tagtggataaatagtagaaaaatgtcagta

SEQ ID NO: 3723 - RNA, 30 nt, Homo sapiens
  source 1..30: mol_type = unassigned RNA
gtagtggataaatagtagaaaaatgtcagt

SEQ ID NO: 3724 - RNA, 30 nt, Homo sapiens
  source 1..30: mol_type = unassigned RNA
tgtagtggataaatagtagaaaaatgtcag

SEQ ID NO: 3725 - RNA, 30 nt, Homo sapiens
  source 1..30: mol_type = unassigned RNA
tgagattttgtagtggataaatagtagaaa

SEQ ID NO: 3726 - RNA, 30 nt, Homo sapiens
  source 1..30: mol_type = unassigned RNA
cttctgagattttgtagtggataaatagta

SEQ ID NO: 3727 - RNA, 30 nt, Homo sapiens
  source 1..30: mol_type = unassigned RNA
tgttacttctgagattttgtagtggataaa

SEQ ID NO: 3728 - RNA, 30 nt, Homo sapiens
  source 1..30: mol_type = unassigned RNA
atgttacttctgagattttgtagtggataa

SEQ ID NO: 3729 - RNA, 30 nt, Homo sapiens
  source 1..30: mol_type = unassigned RNA
taataccatttatgttacttctgagatttt

SEQ ID NO: 3730 - RNA, 30 nt, Homo sapiens
  source 1..30: mol_type = unassigned RNA
ttataataccatttatgttacttctgagat

SEQ ID NO: 3731 - RNA, 30 nt, Homo sapiens
  source 1..30: mol_type = unassigned RNA
ttattataataccatttatgttacttctga

SEQ ID NO: 3732 - RNA, 30 nt, Homo sapiens
  source 1..30: mol_type = unassigned RNA
cattgttattataataccatttatgttact

SEQ ID NO: 3733 - RNA, 30 nt, Homo sapiens
  source 1..30: mol_type = unassigned RNA
ttacattgttattataataccatttatgtt

SEQ ID NO: 3734 - RNA, 30 nt, Homo sapiens
  source 1..30: mol_type = unassigned RNA
gcagccgaatattttaatgcttaaaaataa

SEQ ID NO: 3735 - RNA, 30 nt, Homo sapiens
  source 1..30: mol_type = unassigned RNA
attacattgttattataataccatttatgt

SEQ ID NO: 3736 - RNA, 30 nt, Homo sapiens
  source 1..30: mol_type = unassigned RNA
tcagttttattacattgttattataatacc

SEQ ID NO: 3737 - RNA, 30 nt, Homo sapiens
  source 1..30: mol_type = unassigned RNA
cttctcagttttattacattgttattataa

SEQ ID NO: 3738 - RNA, 30 nt, Homo sapiens
  source 1..30: mol_type = unassigned RNA
acttctcagttttattacattgttattata

SEQ ID NO: 3739 - RNA, 30 nt, Homo sapiens
  source 1..30: mol_type = unassigned RNA
tacttctcagttttattacattgttattat

SEQ ID NO: 3740 - RNA, 30 nt, Homo sapiens
  source 1..30: mol_type = unassigned RNA
cctgatggttttacttctcagttttattac

SEQ ID NO: 3741 - RNA, 30 nt, Homo sapiens
  source 1..30: mol_type = unassigned RNA
ttccctgatggttttacttctcagttttat

SEQ ID NO: 3742 - RNA, 30 nt, Homo sapiens
  source 1..30: mol_type = unassigned RNA
attattccctgatggttttacttctcagtt

SEQ ID NO: 3743 - RNA, 30 nt, Homo sapiens
  source 1..30: mol_type = unassigned RNA
aaggagacaggatgaaatgagtggtcataa

SEQ ID NO: 3744 - RNA, 30 nt, Homo sapiens
  source 1..30: mol_type = unassigned RNA
caaggagacaggatgaaatgagtggtcata

SEQ ID NO: 3745 - RNA, 30 nt, Homo sapiens
  source 1..30: mol_type = unassigned RNA
tcaaggagacaggatgaaatgagtggtcat

SEQ ID NO: 3746 - RNA, 30 nt, Homo sapiens
  source 1..30: mol_type = unassigned RNA
tacaattttcaaggagacaggatgaaatga

SEQ ID NO: 3747 - RNA, 30 nt, Homo sapiens
  source 1..30: mol_type = unassigned RNA
ccctagtggatgaacagagcttgtacaatt

SEQ ID NO: 3748 - RNA, 30 nt, Homo sapiens
  source 1..30: mol_type = unassigned RNA
accctagtggatgaacagagcttgtacaat

SEQ ID NO: 3749 - RNA, 30 nt, Homo sapiens
  source 1..30: mol_type = unassigned RNA
tattacattgttattataataccatttatg

SEQ ID NO: 3750 - RNA, 30 nt, Homo sapiens
  source 1..30: mol_type = unassigned RNA
ttgattacattttatgtaattctaatccag

SEQ ID NO: 3751 - RNA, 30 nt, Homo sapiens
  source 1..30: mol_type = unassigned RNA
atcaattaatctcatgtatttagtttatac

SEQ ID NO: 3752 - RNA, 30 nt, Homo sapiens
  source 1..30: mol_type = unassigned RNA
caggataaaactgaaagaaatggcagtagt

SEQ ID NO: 3753 - RNA, 30 nt, Homo sapiens
  source 1..30: mol_type = unassigned RNA
gcgggaaaagcttctagaacctagacatgt

SEQ ID NO: 3754 - RNA, 30 nt, Homo sapiens
  source 1..30: mol_type = unassigned RNA
atcgtttgcgggaaaagcttctagaaccta

SEQ ID NO: 3755 - RNA, 30 nt, Homo sapiens
  source 1..30: mol_type = unassigned RNA
gatcgtttgcgggaaaagcttctagaacct

SEQ ID NO: 3756 - RNA, 30 nt, Homo sapiens
  source 1..30: mol_type = unassigned RNA
aagacctttgatcgtttgcgggaaaagctt

SEQ ID NO: 3757 - RNA, 30 nt, Homo sapiens
  source 1..30: mol_type = unassigned RNA
gaagacctttgatcgtttgcgggaaaagct

SEQ ID NO: 3758 - RNA, 30 nt, Homo sapiens
  source 1..30: mol_type = unassigned RNA
tttgaagacctttgatcgtttgcgggaaaa

SEQ ID NO: 3759 - RNA, 30 nt, Homo sapiens
  source 1..30: mol_type = unassigned RNA
gacatagacacagataaagggttctttgaa

SEQ ID NO: 3760 - RNA, 30 nt, Homo sapiens
  source 1..30: mol_type = unassigned RNA
agacatagacacagataaagggttctttga

SEQ ID NO: 3761 - RNA, 30 nt, Homo sapiens
  source 1..30: mol_type = unassigned RNA
catagagtgtttagacatagacacagataa

SEQ ID NO: 3762 - RNA, 30 nt, Homo sapiens
  source 1..30: mol_type = unassigned RNA
ggaagcaaattacatagagtgtttagacat

SEQ ID NO: 3763 - RNA, 30 nt, Homo sapiens
  source 1..30: mol_type = unassigned RNA
cggaagcaaattacatagagtgtttagaca

SEQ ID NO: 3764 - RNA, 30 nt, Homo sapiens
  source 1..30: mol_type = unassigned RNA
tcggaagcaaattacatagagtgtttagac

SEQ ID NO: 3765 - RNA, 30 nt, Homo sapiens
  source 1..30: mol_type = unassigned RNA
ttttcggaagcaaattacatagagtgttta

SEQ ID NO: 3766 - RNA, 30 nt, Homo sapiens
  source 1..30: mol_type = unassigned RNA
cttttcggaagcaaattacatagagtgttt

SEQ ID NO: 3767 - RNA, 30 nt, Homo sapiens
  source 1..30: mol_type = unassigned RNA
tcttttcggaagcaaattacatagagtgtt

SEQ ID NO: 3768 - RNA, 30 nt, Homo sapiens
  source 1..30: mol_type = unassigned RNA
ttcttttcggaagcaaattacatagagtgt

SEQ ID NO: 3769 - RNA, 30 nt, Homo sapiens
  source 1..30: mol_type = unassigned RNA
acatttttcttttcggaagcaaattacata

SEQ ID NO: 3770 - RNA, 30 nt, Homo sapiens
  source 1..30: mol_type = unassigned RNA
agagagatgggaaaagtgggttaacatttt

SEQ ID NO: 3771 - RNA, 30 nt, Homo sapiens
  source 1..30: mol_type = unassigned RNA
aagagagatgggaaaagtgggttaacattt

SEQ ID NO: 3772 - RNA, 30 nt, Homo sapiens
  source 1..30: mol_type = unassigned RNA
taagagagatgggaaaagtgggttaacatt

SEQ ID NO: 3773 - RNA, 30 nt, Homo sapiens
  source 1..30: mol_type = unassigned RNA
tgcttttaagagagatgggaaaagtgggtt

SEQ ID NO: 3774 - RNA, 30 nt, Homo sapiens
  source 1..30: mol_type = unassigned RNA
ttctgcttttaagagagatgggaaaagtgg

SEQ ID NO: 3775 - RNA, 30 nt, Homo sapiens
  source 1..30: mol_type = unassigned RNA
caagagagacctgaccactgaccccgccct

SEQ ID NO: 3776 - RNA, 30 nt, Homo sapiens
  source 1..30: mol_type = unassigned RNA
gaaagggggtcgggtggggagcgcagcgtg

SEQ ID NO: 3777 - RNA, 30 nt, Homo sapiens
  source 1..30: mol_type = unassigned RNA
attcgaaagggggtcgggtggggagcgcag

SEQ ID NO: 3778 - RNA, 30 nt, Homo sapiens
  source 1..30: mol_type = unassigned RNA
tgtgcggaccagcggtcccggggggaggca

SEQ ID NO: 3779 - RNA, 30 nt, Homo sapiens
  source 1..30: mol_type = unassigned RNA
gtgtgcggaccagcggtcccggggggaggc

SEQ ID NO: 3780 - RNA, 30 nt, Homo sapiens
  source 1..30: mol_type = unassigned RNA
cgggaaaagcttctagaacctagacatgtg

SEQ ID NO: 3781 - RNA, 30 nt, Homo sapiens
  source 1..30: mol_type = unassigned RNA
tttgtgtgcggaccagcggtcccgggggga

SEQ ID NO: 3782 - RNA, 30 nt, Homo sapiens
  source 1..30: mol_type = unassigned RNA
tagaacctagacatgtgtatgtataataat

SEQ ID NO: 3783 - RNA, 30 nt, Homo sapiens
  source 1..30: mol_type = unassigned RNA
agccacgcgaaatttccgttttgtgggtca

SEQ ID NO: 3784 - RNA, 30 nt, Homo sapiens
  source 1..30: mol_type = unassigned RNA
ttttcccccagcccaagccccccgcccacc

SEQ ID NO: 3785 - RNA, 30 nt, Homo sapiens
  source 1..30: mol_type = unassigned RNA
tcgcccacccacggtccgcggagctcgggg

SEQ ID NO: 3786 - RNA, 30 nt, Homo sapiens
  source 1..30: mol_type = unassigned RNA
agggagggctgtctcttctcgcccacccac

SEQ ID NO: 3787 - RNA, 30 nt, Homo sapiens
  source 1..30: mol_type = unassigned RNA
ccagggattcagggagggctgtctcttctc

SEQ ID NO: 3788 - RNA, 30 nt, Homo sapiens
  source 1..30: mol_type = unassigned RNA
atgtgcgcagacccccggcgtggctctcag

SEQ ID NO: 3789 - RNA, 30 nt, Homo sapiens
  source 1..30: mol_type = unassigned RNA
agccccgcagtccacaacggcccgagcacc

SEQ ID NO: 3790 - RNA, 30 nt, Homo sapiens
  source 1..30: mol_type = unassigned RNA
cagccccgcagtccacaacggcccgagcac

SEQ ID NO: 3791 - RNA, 30 nt, Homo sapiens
  source 1..30: mol_type = unassigned RNA
tcagccccgcagtccacaacggcccgagca

SEQ ID NO: 3792 - RNA, 30 nt, Homo sapiens
  source 1..30: mol_type = unassigned RNA
ttcagccccgcagtccacaacggcccgagc

SEQ ID NO: 3793 - RNA, 30 nt, Homo sapiens
  source 1..30: mol_type = unassigned RNA
tttcagccccgcagtccacaacggcccgag

SEQ ID NO: 3794 - RNA, 30 nt, Homo sapiens
  source 1..30: mol_type = unassigned RNA
agctgtatgcagtcctggaacctctttttt

SEQ ID NO: 3795 - RNA, 30 nt, Homo sapiens
  source 1..30: mol_type = unassigned RNA
caggatgcggagacagggaaagctgccgaa

SEQ ID NO: 3796 - RNA, 30 nt, Homo sapiens
  source 1..30: mol_type = unassigned RNA
gttgcaggatgcggagacagggaaagctgc

SEQ ID NO: 3797 - RNA, 30 nt, Homo sapiens
  source 1..30: mol_type = unassigned RNA
tggcgctcagtggccccggggtgaaaaggc

SEQ ID NO: 3798 - RNA, 30 nt, Homo sapiens
  source 1..30: mol_type = unassigned RNA
agtgcccacggttctggcgctcagtggccc

SEQ ID NO: 3799 - RNA, 30 nt, Homo sapiens
  source 1..30: mol_type = unassigned RNA
tgccttgagtgcccacggttctggcgctca

SEQ ID NO: 3800 - RNA, 30 nt, Homo sapiens
  source 1..30: mol_type = unassigned RNA
gtcttgtgccttgagtgcccacggttctgg

SEQ ID NO: 3801 - RNA, 30 nt, Homo sapiens
  source 1..30: mol_type = unassigned RNA
atccgcaattggtcttgtgccttgagtgcc

SEQ ID NO: 3802 - RNA, 30 nt, Homo sapiens
  source 1..30: mol_type = unassigned RNA
agggccttcatccgcaattggtcttgtgcc

SEQ ID NO: 3803 - RNA, 30 nt, Homo sapiens
  source 1..30: mol_type = unassigned RNA
tggattcagggccttcatccgcaattggtc

SEQ ID NO: 3804 - RNA, 30 nt, Homo sapiens
  source 1..30: mol_type = unassigned RNA
ataagctcagagagacaagacagtggagac

SEQ ID NO: 3805 - RNA, 30 nt, Homo sapiens
  source 1..30: mol_type = unassigned RNA
cataagctcagagagacaagacagtggaga

SEQ ID NO: 3806 - RNA, 30 nt, Homo sapiens
  source 1..30: mol_type = unassigned RNA
tgggtcagacagtgccaaatatcggcaatt

SEQ ID NO: 3807 - RNA, 30 nt, Homo sapiens
  source 1..30: mol_type = unassigned RNA
gtgggtcagacagtgccaaatatcggcaat

SEQ ID NO: 3808 - RNA, 30 nt, Homo sapiens
  source 1..30: mol_type = unassigned RNA
tgtgggtcagacagtgccaaatatcggcaa

SEQ ID NO: 3809 - RNA, 30 nt, Homo sapiens
  source 1..30: mol_type = unassigned RNA
cgttttgtgggtcagacagtgccaaatatc

SEQ ID NO: 3810 - RNA, 30 nt, Homo sapiens
  source 1..30: mol_type = unassigned RNA
ccgttttgtgggtcagacagtgccaaatat

SEQ ID NO: 3811 - RNA, 30 nt, Homo sapiens
  source 1..30: mol_type = unassigned RNA
agttaagccacgcgaaatttccgttttgtg

SEQ ID NO: 3812 - RNA, 30 nt, Homo sapiens
  source 1..30: mol_type = unassigned RNA
ctttgtgtgcggaccagcggtcccgggggg

SEQ ID NO: 3813 - RNA, 30 nt, Homo sapiens
  source 1..30: mol_type = unassigned RNA
gaaggcgctggggtggggtttctttgtgtg

SEQ ID NO: 3814 - RNA, 30 nt, Homo sapiens
  source 1..30: mol_type = unassigned RNA
gggcaagggaggggaaggagagaggaagtc

SEQ ID NO: 3815 - RNA, 30 nt, Homo sapiens
  source 1..30: mol_type = unassigned RNA
agggacattttggaaagtgctttataacga

SEQ ID NO: 3816 - RNA, 30 nt, Homo sapiens
  source 1..30: mol_type = unassigned RNA
aatgggcttaagggacattttggaaagtgc

SEQ ID NO: 3817 - RNA, 30 nt, Homo sapiens
  source 1..30: mol_type = unassigned RNA
ccttaaatgggcttaagggacattttggaa

SEQ ID NO: 3818 - RNA, 30 nt, Homo sapiens
  source 1..30: mol_type = unassigned RNA
gccttaaatgggcttaagggacattttgga

SEQ ID NO: 3819 - RNA, 30 nt, Homo sapiens
  source 1..30: mol_type = unassigned RNA
actgtttgccttaaatgggcttaagggaca

SEQ ID NO: 3820 - RNA, 30 nt, Homo sapiens
  source 1..30: mol_type = unassigned RNA
ggactcaatcgtgaggggaggaagctacct

SEQ ID NO: 3821 - RNA, 30 nt, Homo sapiens
  source 1..30: mol_type = unassigned RNA
aaattaggactcaatcgtgaggggaggaag

SEQ ID NO: 3822 - RNA, 30 nt, Homo sapiens
  source 1..30: mol_type = unassigned RNA
aaaattaggactcaatcgtgaggggaggaa

SEQ ID NO: 3823 - RNA, 30 nt, Homo sapiens
  source 1..30: mol_type = unassigned RNA
catatttaaaattaggactcaatcgtgagg

SEQ ID NO: 3824 - RNA, 30 nt, Homo sapiens
  source 1..30: mol_type = unassigned RNA
ccatatttaaaattaggactcaatcgtgag

SEQ ID NO: 3825 - RNA, 30 nt, Homo sapiens
  source 1..30: mol_type = unassigned RNA
tgtttccatatttaaaattaggactcaatc

SEQ ID NO: 3826 - RNA, 30 nt, Homo sapiens
  source 1..30: mol_type = unassigned RNA
ttctgtttccatatttaaaattaggactca

SEQ ID NO: 3827 - RNA, 30 nt, Homo sapiens
  source 1..30: mol_type = unassigned RNA
attctgtttccatatttaaaattaggactc

SEQ ID NO: 3828 - RNA, 30 nt, Homo sapiens
  source 1..30: mol_type = unassigned RNA
ccctcctatgggtagagaatttattctgtt

SEQ ID NO: 3829 - RNA, 30 nt, Homo sapiens
  source 1..30: mol_type = unassigned RNA
aaaggtagaagcgggtaagttgccctccta

SEQ ID NO: 3830 - RNA, 30 nt, Homo sapiens
  source 1..30: mol_type = unassigned RNA
aaaaggtagaagcgggtaagttgccctcct

SEQ ID NO: 3831 - RNA, 30 nt, Homo sapiens
  source 1..30: mol_type = unassigned RNA
taaaaggtagaagcgggtaagttgccctcc

SEQ ID NO: 3832 - RNA, 30 nt, Homo sapiens
  source 1..30: mol_type = unassigned RNA
ttttaaaaggtagaagcgggtaagttgccc

SEQ ID NO: 3833 - RNA, 30 nt, Homo sapiens
  source 1..30: mol_type = unassigned RNA
cttttaaaaggtagaagcgggtaagttgcc

SEQ ID NO: 3834 - RNA, 30 nt, Homo sapiens
  source 1..30: mol_type = unassigned RNA
tgggggaggtgggagggcagagaagaggtc

SEQ ID NO: 3835 - RNA, 30 nt, Homo sapiens
  source 1..30: mol_type = unassigned RNA
atggtaacacaggaccaggaaggacagggc

SEQ ID NO: 3836 - RNA, 30 nt, Homo sapiens
  source 1..30: mol_type = unassigned RNA
taaagaaaaagatgttaatggtaacacagg

SEQ ID NO: 3837 - RNA, 30 nt, Homo sapiens
  source 1..30: mol_type = unassigned RNA
ataaagaaaaagatgttaatggtaacacag

SEQ ID NO: 3838 - RNA, 30 nt, Homo sapiens
  source 1..30: mol_type = unassigned RNA
tataaagaaaaagatgttaatggtaacaca

SEQ ID NO: 3839 - RNA, 30 nt, Homo sapiens
  source 1..30: mol_type = unassigned RNA
agagatattttataaagaaaaagatgttaa

SEQ ID NO: 3840 - RNA, 30 nt, Homo sapiens
  source 1..30: mol_type = unassigned RNA
agctctagaagcattcagagatattttata

SEQ ID NO: 3841 - RNA, 30 nt, Homo sapiens
  source 1..30: mol_type = unassigned RNA
tgagaacaaaaataaaaatgttcctcaccc

SEQ ID NO: 3842 - RNA, 30 nt, Homo sapiens
  source 1..30: mol_type = unassigned RNA
tggaaagtgctttataacgacctttttttt

SEQ ID NO: 3843 - RNA, 30 nt, Homo sapiens
  source 1..30: mol_type = unassigned RNA
ggaaagtgctttataacgaccttttttttt

SEQ ID NO: 3844 - RNA, 30 nt, Homo sapiens
  source 1..30: mol_type = unassigned RNA
gaaagtgctttataacgacctttttttttt

SEQ ID NO: 3845 - RNA, 30 nt, Homo sapiens
  source 1..30: mol_type = unassigned RNA
ataacgaccttttttttttttatttcttct

SEQ ID NO: 3846 - RNA, 30 nt, Homo sapiens
  source 1..30: mol_type = unassigned RNA
agggcaagggaggggaaggagagaggaagt

SEQ ID NO: 3847 - RNA, 30 nt, Homo sapiens
  source 1..30: mol_type = unassigned RNA
tagggcaagggaggggaaggagagaggaag

SEQ ID NO: 3848 - RNA, 30 nt, Homo sapiens
  source 1..30: mol_type = unassigned RNA
ttttagggcaagggaggggaaggagagagg

SEQ ID NO: 3849 - RNA, 30 nt, Homo sapiens
  source 1..30: mol_type = unassigned RNA
gttttagggcaagggaggggaaggagagag

SEQ ID NO: 3850 - RNA, 30 nt, Homo sapiens
  source 1..30: mol_type = unassigned RNA
tctcgtcgaagaaaccgctagtcctggggt

SEQ ID NO: 3851 - RNA, 30 nt, Homo sapiens
  source 1..30: mol_type = unassigned RNA
cggtattgtctcgtcgaagaaaccgctagt

SEQ ID NO: 3852 - RNA, 30 nt, Homo sapiens
  source 1..30: mol_type = unassigned RNA
acggtattgtctcgtcgaagaaaccgctag

SEQ ID NO: 3853 - RNA, 30 nt, Homo sapiens
  source 1..30: mol_type = unassigned RNA
tacggtattgtctcgtcgaagaaaccgcta

SEQ ID NO: 3854 - RNA, 30 nt, Homo sapiens
  source 1..30: mol_type = unassigned RNA
aaagatgggtggagacggggggaggggatg

SEQ ID NO: 3855 - RNA, 30 nt, Homo sapiens
  source 1..30: mol_type = unassigned RNA
gaaagatgggtggagacggggggaggggat

SEQ ID NO: 3856 - RNA, 30 nt, Homo sapiens
  source 1..30: mol_type = unassigned RNA
caaagtcaaagcggtcccatcccgctgttt

SEQ ID NO: 3857 - RNA, 30 nt, Homo sapiens
  source 1..30: mol_type = unassigned RNA
agaagaaaataggaaaggggtaaagggaag

SEQ ID NO: 3858 - RNA, 30 nt, Homo sapiens
  source 1..30: mol_type = unassigned RNA
aagaagaaaataggaaaggggtaaagggaa

SEQ ID NO: 3859 - RNA, 30 nt, Homo sapiens
  source 1..30: mol_type = unassigned RNA
tttcccccagcccaagccccccgcccaccc

SEQ ID NO: 3860 - RNA, 30 nt, Homo sapiens
  source 1..30: mol_type = unassigned RNA
tctagtttaagaagaaaataggaaaggggt

SEQ ID NO: 3861 - RNA, 30 nt, Homo sapiens
  source 1..30: mol_type = unassigned RNA
cttctctagtttaagaagaaaataggaaag

SEQ ID NO: 3862 - RNA, 30 nt, Homo sapiens
  source 1..30: mol_type = unassigned RNA
tttcttctctagtttaagaagaaaatagga

SEQ ID NO: 3863 - RNA, 30 nt, Homo sapiens
  source 1..30: mol_type = unassigned RNA
atttcttctctagtttaagaagaaaatagg

SEQ ID NO: 3864 - RNA, 30 nt, Homo sapiens
  source 1..30: mol_type = unassigned RNA
tatttcttctctagtttaagaagaaaatag

SEQ ID NO: 3865 - RNA, 30 nt, Homo sapiens
  source 1..30: mol_type = unassigned RNA
ttatttcttctctagtttaagaagaaaata

SEQ ID NO: 3866 - RNA, 30 nt, Homo sapiens
  source 1..30: mol_type = unassigned RNA
tttatttcttctctagtttaagaagaaaat

SEQ ID NO: 3867 - RNA, 30 nt, Homo sapiens
  source 1..30: mol_type = unassigned RNA
ttttatttcttctctagtttaagaagaaaa

SEQ ID NO: 3868 - RNA, 30 nt, Homo sapiens
  source 1..30: mol_type = unassigned RNA
tttttatttcttctctagtttaagaagaaa

SEQ ID NO: 3869 - RNA, 30 nt, Homo sapiens
  source 1..30: mol_type = unassigned RNA
ttttttatttcttctctagtttaagaagaa

SEQ ID NO: 3870 - RNA, 30 nt, Homo sapiens
  source 1..30: mol_type = unassigned RNA
tttttttatttcttctctagtttaagaaga

SEQ ID NO: 3871 - RNA, 30 nt, Homo sapiens
  source 1..30: mol_type = unassigned RNA
ttttttttatttcttctctagtttaagaag

SEQ ID NO: 3872 - RNA, 30 nt, Homo sapiens
  source 1..30: mol_type = unassigned RNA
tttttttttatttcttctctagtttaagaa

SEQ ID NO: 3873 - RNA, 30 nt, Homo sapiens
  source 1..30: mol_type = unassigned RNA
taacgaccttttttttttttatttcttctc

SEQ ID NO: 3874 - RNA, 30 nt, Homo sapiens
  source 1..30: mol_type = unassigned RNA
ttctctagtttaagaagaaaataggaaagg

SEQ ID NO: 3875 - RNA, 30 nt, Homo sapiens
  source 1..30: mol_type = unassigned RNA
ttcccccagcccaagccccccgcccaccct

SEQ ID NO: 3876 - RNA, 30 nt, Homo sapiens
  source 1..30: mol_type = unassigned RNA
tcccccagcccaagccccccgcccaccctc

SEQ ID NO: 3877 - RNA, 30 nt, Homo sapiens
  source 1..30: mol_type = unassigned RNA
cccccagcccaagccccccgcccaccctct

SEQ ID NO: 3878 - RNA, 30 nt, Homo sapiens
  source 1..30: mol_type = unassigned RNA
tggccataatttaactgcatttgcaaatca

SEQ ID NO: 3879 - RNA, 30 nt, Homo sapiens
  source 1..30: mol_type = unassigned RNA
ctggccataatttaactgcatttgcaaatc

SEQ ID NO: 3880 - RNA, 30 nt, Homo sapiens
  source 1..30: mol_type = unassigned RNA
atacagcctcaatcctacacagatacatgg

SEQ ID NO: 3881 - RNA, 30 nt, Homo sapiens
  source 1..30: mol_type = unassigned RNA
ttgatacagcctcaatcctacacagataca

SEQ ID NO: 3882 - RNA, 30 nt, Homo sapiens
  source 1..30: mol_type = unassigned RNA
caactgctgattcttgatacagcctcaatc

SEQ ID NO: 3883 - RNA, 30 nt, Homo sapiens
  source 1..30: mol_type = unassigned RNA
ttccaactgctgattcttgatacagcctca

SEQ ID NO: 3884 - RNA, 30 nt, Homo sapiens
  source 1..30: mol_type = unassigned RNA
ccctgaaactgttcttccaactgctgattc

SEQ ID NO: 3885 - RNA, 30 nt, Homo sapiens
  source 1..30: mol_type = unassigned RNA
cccctgaaactgttcttccaactgctgatt

SEQ ID NO: 3886 - RNA, 30 nt, Homo sapiens
  source 1..30: mol_type = unassigned RNA
tcccctgaaactgttcttccaactgctgat

SEQ ID NO: 3887 - RNA, 30 nt, Homo sapiens
  source 1..30: mol_type = unassigned RNA
ttcccctgaaactgttcttccaactgctga

SEQ ID NO: 3888 - RNA, 30 nt, Homo sapiens
  source 1..30: mol_type = unassigned RNA
tttcccctgaaactgttcttccaactgctg

SEQ ID NO: 3889 - RNA, 30 nt, Homo sapiens
  source 1..30: mol_type = unassigned RNA
agttttttcccctgaaactgttcttccaac

SEQ ID NO: 3890 - RNA, 30 nt, Homo sapiens
  source 1..30: mol_type = unassigned RNA
aagttttttcccctgaaactgttcttccaa

SEQ ID NO: 3891 - RNA, 30 nt, Homo sapiens
  source 1..30: mol_type = unassigned RNA
taagttttttcccctgaaactgttcttcca

SEQ ID NO: 3892 - RNA, 30 nt, Homo sapiens
  source 1..30: mol_type = unassigned RNA
tgcacaaaattttaagttttttcccctgaa

SEQ ID NO: 3893 - RNA, 30 nt, Homo sapiens
  source 1..30: mol_type = unassigned RNA
atgcacaaaattttaagttttttcccctga

SEQ ID NO: 3894 - RNA, 30 nt, Homo sapiens
  source 1..30: mol_type = unassigned RNA
tatctataaatatataaatatagtttatgc

SEQ ID NO: 3895 - RNA, 30 nt, Homo sapiens
  source 1..30: mol_type = unassigned RNA
aacataaggttatatctataaatatataaa

SEQ ID NO: 3896 - RNA, 30 nt, Homo sapiens
  source 1..30: mol_type = unassigned RNA
agatgatcttcaacataaggttatatctat

SEQ ID NO: 3897 - RNA, 30 nt, Homo sapiens
  source 1..30: mol_type = unassigned RNA
tggctgcaatgggtgagaatacacatatat

SEQ ID NO: 3898 - RNA, 30 nt, Homo sapiens
  source 1..30: mol_type = unassigned RNA
gtggctgcaatgggtgagaatacacatata

SEQ ID NO: 3899 - RNA, 30 nt, Homo sapiens
  source 1..30: mol_type = unassigned RNA
tttgtggctgcaatgggtgagaatacacat

SEQ ID NO: 3900 - RNA, 30 nt, Homo sapiens
  source 1..30: mol_type = unassigned RNA
tctgcaaagaattgtttgtggctgcaatgg

SEQ ID NO: 3901 - RNA, 30 nt, Homo sapiens
  source 1..30: mol_type = unassigned RNA
ctggaaaattctctgcaaagaattgtttgt

SEQ ID NO: 3902 - RNA, 30 nt, Homo sapiens
  source 1..30: mol_type = unassigned RNA
tgtgccaacgattgctggaaaattctctgc

SEQ ID NO: 3903 - RNA, 30 nt, Homo sapiens
  source 1..30: mol_type = unassigned RNA
gtgtgccaacgattgctggaaaattctctg

SEQ ID NO: 3904 - RNA, 30 nt, Homo sapiens
  source 1..30: mol_type = unassigned RNA
ctaagagcagggtttgtgtgccaacgattg

SEQ ID NO: 3905 - RNA, 30 nt, Homo sapiens
  source 1..30: mol_type = unassigned RNA
aactgcatttgcaaatcatgaaaaaaacac

SEQ ID NO: 3906 - RNA, 30 nt, Homo sapiens
  source 1..30: mol_type = unassigned RNA
gcaaatcatgaaaaaaacactacttctgca

SEQ ID NO: 3907 - RNA, 30 nt, Homo sapiens
  source 1..30: mol_type = unassigned RNA
caaatcatgaaaaaaacactacttctgcag

SEQ ID NO: 3908 - RNA, 30 nt, Homo sapiens
  source 1..30: mol_type = unassigned RNA
tgcagtattaaaataatagattttgaaatt

SEQ ID NO: 3909 - RNA, 30 nt, Homo sapiens
  source 1..30: mol_type = unassigned RNA
gtcagaatttcaggataaaactgaaagaaa

SEQ ID NO: 3910 - RNA, 30 nt, Homo sapiens
  source 1..30: mol_type = unassigned RNA
ggtcagaatttcaggataaaactgaaagaa

SEQ ID NO: 3911 - RNA, 30 nt, Homo sapiens
  source 1..30: mol_type = unassigned RNA
tgaatggatatataagtaactagaaatgaa

SEQ ID NO: 3912 - RNA, 30 nt, Homo sapiens
  source 1..30: mol_type = unassigned RNA
taatgaagtgggcaccttctgaatggatat

SEQ ID NO: 3913 - RNA, 30 nt, Homo sapiens
  source 1..30: mol_type = unassigned RNA
ctaatgaagtgggcaccttctgaatggata

SEQ ID NO: 3914 - RNA, 30 nt, Homo sapiens
  source 1..30: mol_type = unassigned RNA
tctaatgaagtgggcaccttctgaatggat

SEQ ID NO: 3915 - RNA, 30 nt, Homo sapiens
  source 1..30: mol_type = unassigned RNA
tcttttctaatgaagtgggcaccttctgaa

SEQ ID NO: 3916 - RNA, 30 nt, Homo sapiens
  source 1..30: mol_type = unassigned RNA
cccattatcttttctaatgaagtgggcacc

SEQ ID NO: 3917 - RNA, 30 nt, Homo sapiens
  source 1..30: mol_type = unassigned RNA
taagaggtgcatataatattccccattatc

SEQ ID NO: 3918 - RNA, 30 nt, Homo sapiens
  source 1..30: mol_type = unassigned RNA
agcatgattgtaagaggtgcatataatatt

SEQ ID NO: 3919 - RNA, 30 nt, Homo sapiens
  source 1..30: mol_type = unassigned RNA
tgtattcagcatgattgtaagaggtgcata

SEQ ID NO: 3920 - RNA, 30 nt, Homo sapiens
  source 1..30: mol_type = unassigned RNA
aacaattatgtattcagcatgattgtaaga

SEQ ID NO: 3921 - RNA, 30 nt, Homo sapiens
  source 1..30: mol_type = unassigned RNA
attaaacaattatgtattcagcatgattgt

SEQ ID NO: 3922 - RNA, 30 nt, Homo sapiens
  source 1..30: mol_type = unassigned RNA
atgtggctaagatacatgtgcaagtgcttg

SEQ ID NO: 3923 - RNA, 30 nt, Homo sapiens
  source 1..30: mol_type = unassigned RNA
ctgattcattaaacaattatgtattcagca

SEQ ID NO: 3924 - RNA, 30 nt, Homo sapiens
  source 1..30: mol_type = unassigned RNA
tcctgattcattaaacaattatgtattcag

SEQ ID NO: 3925 - RNA, 30 nt, Homo sapiens
  source 1..30: mol_type = unassigned RNA
ttcctgattcattaaacaattatgtattca

SEQ ID NO: 3926 - RNA, 30 nt, Homo sapiens
  source 1..30: mol_type = unassigned RNA
tttcctgattcattaaacaattatgtattc

SEQ ID NO: 3927 - RNA, 30 nt, Homo sapiens
  source 1..30: mol_type = unassigned RNA
tcagggcgagtgcttttttcctgattcatt

SEQ ID NO: 3928 - RNA, 30 nt, Homo sapiens
  source 1..30: mol_type = unassigned RNA
attatcagggcgagtgcttttttcctgatt

SEQ ID NO: 3929 - RNA, 30 nt, Homo sapiens
  source 1..30: mol_type = unassigned RNA
aaagataattaattatcagggcgagtgctt

SEQ ID NO: 3930 - RNA, 30 nt, Homo sapiens
  source 1..30: mol_type = unassigned RNA
caaagataattaattatcagggcgagtgct

SEQ ID NO: 3931 - RNA, 30 nt, Homo sapiens
  source 1..30: mol_type = unassigned RNA
caatttcaaagataattaattatcagggcg

SEQ ID NO: 3932 - RNA, 30 nt, Homo sapiens
  source 1..30: mol_type = unassigned RNA
attccaatttcaaagataattaattatcag

SEQ ID NO: 3933 - RNA, 30 nt, Homo sapiens
  source 1..30: mol_type = unassigned RNA
aaattaattccaatttcaaagataattaat

SEQ ID NO: 3934 - RNA, 30 nt, Homo sapiens
  source 1..30: mol_type = unassigned RNA
gaaattaattccaatttcaaagataattaa

SEQ ID NO: 3935 - RNA, 30 nt, Homo sapiens
  source 1..30: mol_type = unassigned RNA
tgaaattaattccaatttcaaagataatta

SEQ ID NO: 3936 - RNA, 30 nt, Homo sapiens
  source 1..30: mol_type = unassigned RNA
aaataatagattttgaaattaattccaatt

SEQ ID NO: 3937 - RNA, 30 nt, Homo sapiens
  source 1..30: mol_type = unassigned RNA
cctgattcattaaacaattatgtattcagc

SEQ ID NO: 3938 - RNA, 30 nt, Homo sapiens
  source 1..30: mol_type = unassigned RNA
aggataaaactgaaagaaatggcagtagtt

SEQ ID NO: 3939 - RNA, 30 nt, Homo sapiens
  source 1..30: mol_type = unassigned RNA
tgtatgttcatgtggctaagatacatgtgc

SEQ ID NO: 3940 - RNA, 30 nt, Homo sapiens
  source 1..30: mol_type = unassigned RNA
cttcctgccaggattatgtatgttcatgtg

SEQ ID NO: 3941 - RNA, 30 nt, Homo sapiens
  source 1..30: mol_type = unassigned RNA
atgattcagtagccttgtttgttctcattt

SEQ ID NO: 3942 - RNA, 30 nt, Homo sapiens
  source 1..30: mol_type = unassigned RNA
aatgattcagtagccttgtttgttctcatt

SEQ ID NO: 3943 - RNA, 30 nt, Homo sapiens
  source 1..30: mol_type = unassigned RNA
tttaatgattcagtagccttgtttgttctc

SEQ ID NO: 3944 - RNA, 30 nt, Homo sapiens
  source 1..30: mol_type = unassigned RNA
ttatttaatgattcagtagccttgtttgtt

SEQ ID NO: 3945 - RNA, 30 nt, Homo sapiens
  source 1..30: mol_type = unassigned RNA
ttattatttaatgattcagtagccttgttt

SEQ ID NO: 3946 - RNA, 30 nt, Homo sapiens
  source 1..30: mol_type = unassigned RNA
aaatcgttgttattatttaatgattcagta

SEQ ID NO: 3947 - RNA, 30 nt, Homo sapiens
  source 1..30: mol_type = unassigned RNA
caaatcgttgttattatttaatgattcagt

SEQ ID NO: 3948 - RNA, 30 nt, Homo sapiens
  source 1..30: mol_type = unassigned RNA
tcatttcaaatcgttgttattatttaatga

SEQ ID NO: 3949 - RNA, 30 nt, Homo sapiens
  source 1..30: mol_type = unassigned RNA
ttatcatttcaaatcgttgttattatttaa

SEQ ID NO: 3950 - RNA, 30 nt, Homo sapiens
  source 1..30: mol_type = unassigned RNA
cgctgcaggctagtggctgcaaactcatcg

SEQ ID NO: 3951 - RNA, 30 nt, Homo sapiens
  source 1..30: mol_type = unassigned RNA
ccgctgcaggctagtggctgcaaactcatc

SEQ ID NO: 3952 - RNA, 30 nt, Homo sapiens
  source 1..30: mol_type = unassigned RNA
tgcacccctcagaaaggtttccgctgcagg

SEQ ID NO: 3953 - RNA, 30 nt, Homo sapiens
  source 1..30: mol_type = unassigned RNA
ctgcacccctcagaaaggtttccgctgcag

SEQ ID NO: 3954 - RNA, 30 nt, Homo sapiens
  source 1..30: mol_type = unassigned RNA
tgagaatgggtggtgggggcgatctcgcct

SEQ ID NO: 3955 - RNA, 30 nt, Homo sapiens
  source 1..30: mol_type = unassigned RNA
actcgcacgtccagaaaggttctgagaatg

SEQ ID NO: 3956 - RNA, 30 nt, Homo sapiens
  source 1..30: mol_type = unassigned RNA
gcagttcactcgcacgtccagaaaggttct

SEQ ID NO: 3957 - RNA, 30 nt, Homo sapiens
  source 1..30: mol_type = unassigned RNA
cacaattcgcagttcactcgcacgtccaga

SEQ ID NO: 3958 - RNA, 30 nt, Homo sapiens
  source 1..30: mol_type = unassigned RNA
ccacaattcgcagttcactcgcacgtccag

SEQ ID NO: 3959 - RNA, 30 nt, Homo sapiens
  source 1..30: mol_type = unassigned RNA
tgcgcagtgtcctgagctacccccgctttc

SEQ ID NO: 3960 - RNA, 30 nt, Homo sapiens
  source 1..30: mol_type = unassigned RNA
ctgcgcagtgtcctgagctacccccgcttt

SEQ ID NO: 3961 - RNA, 30 nt, Homo sapiens
  source 1..30: mol_type = unassigned RNA
ggcgctcgcccccgcggtgcagccggggag

SEQ ID NO: 3962 - RNA, 30 nt, Homo sapiens
  source 1..30: mol_type = unassigned RNA
tctaagggagaccctcgctcctccagcggg

SEQ ID NO: 3963 - RNA, 30 nt, Homo sapiens
  source 1..30: mol_type = unassigned RNA
cagaatggagaccccgcgaggggcttctct

SEQ ID NO: 3964 - RNA, 30 nt, Homo sapiens
  source 1..30: mol_type = unassigned RNA
ccagaatggagaccccgcgaggggcttctc

SEQ ID NO: 3965 - RNA, 30 nt, Homo sapiens
  source 1..30: mol_type = unassigned RNA
tccagaatggagaccccgcgaggggcttct

SEQ ID NO: 3966 - RNA, 30 nt, Homo sapiens
  source 1..30: mol_type = unassigned RNA
tctatgattttccagaatggagaccccgcg

SEQ ID NO: 3967 - RNA, 30 nt, Homo sapiens
  source 1..30: mol_type = unassigned RNA
ccccagcccaagccccccgcccaccctctg

SEQ ID NO: 3968 - RNA, 30 nt, Homo sapiens
  source 1..30: mol_type = unassigned RNA
agtagccttgtttgttctcatttgttcaaa

SEQ ID NO: 3969 - RNA, 30 nt, Homo sapiens
  source 1..30: mol_type = unassigned RNA
tttgttctcatttgttcaaaagggacgtgg

SEQ ID NO: 3970 - RNA, 30 nt, Homo sapiens
  source 1..30: mol_type = unassigned RNA
gttctcatttgttcaaaagggacgtggatt

SEQ ID NO: 3971 - RNA, 30 nt, Homo sapiens
  source 1..30: mol_type = unassigned RNA
ttctcatttgttcaaaagggacgtggattg

SEQ ID NO: 3972 - RNA, 30 nt, Homo sapiens
  source 1..30: mol_type = unassigned RNA
gcttcctgccaggattatgtatgttcatgt

SEQ ID NO: 3973 - RNA, 30 nt, Homo sapiens
  source 1..30: mol_type = unassigned RNA
tgcttcctgccaggattatgtatgttcatg

SEQ ID NO: 3974 - RNA, 30 nt, Homo sapiens
  source 1..30: mol_type = unassigned RNA
ttgcttcctgccaggattatgtatgttcat

SEQ ID NO: 3975 - RNA, 30 nt, Homo sapiens
  source 1..30: mol_type = unassigned RNA
taaagcaaatatatttttgcttcctgccag

SEQ ID NO: 3976 - RNA, 30 nt, Homo sapiens
  source 1..30: mol_type = unassigned RNA
agttataaagcaaatatatttttgcttcct

SEQ ID NO: 3977 - RNA, 30 nt, Homo sapiens
  source 1..30: mol_type = unassigned RNA
aagttataaagcaaatatatttttgcttcc

SEQ ID NO: 3978 - RNA, 30 nt, Homo sapiens
  source 1..30: mol_type = unassigned RNA
taagttataaagcaaatatatttttgcttc

SEQ ID NO: 3979 - RNA, 30 nt, Homo sapiens
  source 1..30: mol_type = unassigned RNA
attttaagttataaagcaaatatatttttg

SEQ ID NO: 3980 - RNA, 30 nt, Homo sapiens
  source 1..30: mol_type = unassigned RNA
ttcattttaagttataaagcaaatatattt

SEQ ID NO: 3981 - RNA, 30 nt, Homo sapiens
  source 1..30: mol_type = unassigned RNA
tctccagttgttcattttaagttataaagc

SEQ ID NO: 3982 - RNA, 30 nt, Homo sapiens
  source 1..30: mol_type = unassigned RNA
gtctccagttgttcattttaagttataaag

SEQ ID NO: 3983 - RNA, 30 nt, Homo sapiens
  source 1..30: mol_type = unassigned RNA
ccccacaaaaaggtaaatttgtctccagtt

SEQ ID NO: 3984 - RNA, 30 nt, Homo sapiens
  source 1..30: mol_type = unassigned RNA
cccccacaaaaaggtaaatttgtctccagt

SEQ ID NO: 3985 - RNA, 30 nt, Homo sapiens
  source 1..30: mol_type = unassigned RNA
ctgccaggattatgtatgttcatgtggcta

SEQ ID NO: 3986 - RNA, 30 nt, Homo sapiens
  source 1..30: mol_type = unassigned RNA
ccctcatccctttcccccacaaaaaggtaa

SEQ ID NO: 3987 - RNA, 30 nt, Homo sapiens
  source 1..30: mol_type = unassigned RNA
cttcctcctaattgccctcatccctttccc

SEQ ID NO: 3988 - RNA, 30 nt, Homo sapiens
  source 1..30: mol_type = unassigned RNA
gcttcctcctaattgccctcatccctttcc

SEQ ID NO: 3989 - RNA, 30 nt, Homo sapiens
  source 1..30: mol_type = unassigned RNA
gctttgcttcctcctaattgccctcatccc

SEQ ID NO: 3990 - RNA, 30 nt, Homo sapiens
  source 1..30: mol_type = unassigned RNA
cgttcgctttgcttcctcctaattgccctc

SEQ ID NO: 3991 - RNA, 30 nt, Homo sapiens
  source 1..30: mol_type = unassigned RNA
ttgcgttcgctttgcttcctcctaattgcc

SEQ ID NO: 3992 - RNA, 30 nt, Homo sapiens
  source 1..30: mol_type = unassigned RNA
acccttgttgcgttcgctttgcttcctcct

SEQ ID NO: 3993 - RNA, 30 nt, Homo sapiens
  source 1..30: mol_type = unassigned RNA
aggattaacccttgttgcgttcgctttgct

SEQ ID NO: 3994 - RNA, 30 nt, Homo sapiens
  source 1..30: mol_type = unassigned RNA
gttaaggattaacccttgttgcgttcgctt

SEQ ID NO: 3995 - RNA, 30 nt, Homo sapiens
  source 1..30: mol_type = unassigned RNA
ctcttggttaaggattaacccttgttgcgt

SEQ ID NO: 3996 - RNA, 30 nt, Homo sapiens
  source 1..30: mol_type = unassigned RNA
aaaagggacgtggattgctcttggttaagg

SEQ ID NO: 3997 - RNA, 30 nt, Homo sapiens
  source 1..30: mol_type = unassigned RNA
ttcaaaagggacgtggattgctcttggtta

SEQ ID NO: 3998 - RNA, 30 nt, Homo sapiens
  source 1..30: mol_type = unassigned RNA
gttcaaaagggacgtggattgctcttggtt

SEQ ID NO: 3999 - RNA, 30 nt, Homo sapiens
  source 1..30: mol_type = unassigned RNA
tcatttgttcaaaagggacgtggattgctc

SEQ ID NO: 4000 - RNA, 30 nt, Homo sapiens
  source 1..30: mol_type = unassigned RNA
ctcctaattgccctcatccctttcccccac

SEQ ID NO: 4001 - RNA, 30 nt, Homo sapiens
  source 1..30: mol_type = unassigned RNA
tgattacattttatgtaattctaatccagc

SEQ ID NO: 4002 - RNA, 30 nt, Homo sapiens
  source 1..30: mol_type = unassigned RNA
actgcatttgcaaatcatgaaaaaaacact

SEQ ID NO: 4003 - RNA, 30 nt, Homo sapiens
  source 1..30: mol_type = unassigned RNA
attacattttatgtaattctaatccagcta

SEQ ID NO: 4004 - RNA, 30 nt, Homo sapiens
  source 1..30: mol_type = unassigned RNA
gcacattaaccattagtacaagtacccaat

SEQ ID NO: 4005 - RNA, 30 nt, Homo sapiens
  source 1..30: mol_type = unassigned RNA
gagttcgcacattaaccattagtacaagta

SEQ ID NO: 4006 - RNA, 30 nt, Homo sapiens
  source 1..30: mol_type = unassigned RNA
gatgttggagttcgcacattaaccattagt

SEQ ID NO: 4007 - RNA, 30 nt, Homo sapiens
  source 1..30: mol_type = unassigned RNA
ggatgttggagttcgcacattaaccattag

SEQ ID NO: 4008 - RNA, 30 nt, Homo sapiens
  source 1..30: mol_type = unassigned RNA
tggatgttggagttcgcacattaaccatta

SEQ ID NO: 4009 - RNA, 30 nt, Homo sapiens
  source 1..30: mol_type = unassigned RNA
tattttggatgttggagttcgcacattaac

SEQ ID NO: 4010 - RNA, 30 nt, Homo sapiens
  source 1..30: mol_type = unassigned RNA
tggaataattgtattttggatgttggagtt

SEQ ID NO: 4011 - RNA, 30 nt, Homo sapiens
  source 1..30: mol_type = unassigned RNA
ttctggaataattgtattttggatgttgga

SEQ ID NO: 4012 - RNA, 30 nt, Homo sapiens
  source 1..30: mol_type = unassigned RNA
ttcttctggaataattgtattttggatgtt

SEQ ID NO: 4013 - RNA, 30 nt, Homo sapiens
  source 1..30: mol_type = unassigned RNA
gcagttattcttctggaataattgtatttt

SEQ ID NO: 4014 - RNA, 30 nt, Homo sapiens
  source 1..30: mol_type = unassigned RNA
agcagttattcttctggaataattgtattt

SEQ ID NO: 4015 - RNA, 30 nt, Homo sapiens
  source 1..30: mol_type = unassigned RNA
taaagcaacgcctgcaagagtgcccattta

SEQ ID NO: 4016 - RNA, 30 nt, Homo sapiens
  source 1..30: mol_type = unassigned RNA
caaagattgtaaagcaacgcctgcaagagt

SEQ ID NO: 4017 - RNA, 30 nt, Homo sapiens
  source 1..30: mol_type = unassigned RNA
acaaagattgtaaagcaacgcctgcaagag

SEQ ID NO: 4018 - RNA, 30 nt, Homo sapiens
  source 1..30: mol_type = unassigned RNA
tacaaagattgtaaagcaacgcctgcaaga

SEQ ID NO: 4019 - RNA, 30 nt, Homo sapiens
  source 1..30: mol_type = unassigned RNA
ttacaaagattgtaaagcaacgcctgcaag

SEQ ID NO: 4020 - RNA, 30 nt, Homo sapiens
  source 1..30: mol_type = unassigned RNA
tttacaaagattgtaaagcaacgcctgcaa

SEQ ID NO: 4021 - RNA, 30 nt, Homo sapiens
  source 1..30: mol_type = unassigned RNA
ttttacaaagattgtaaagcaacgcctgca

SEQ ID NO: 4022 - RNA, 30 nt, Homo sapiens
  source 1..30: mol_type = unassigned RNA
tttttacaaagattgtaaagcaacgcctgc

SEQ ID NO: 4023 - RNA, 30 nt, Homo sapiens
  source 1..30: mol_type = unassigned RNA
ttttttacaaagattgtaaagcaacgcctg

SEQ ID NO: 4024 - RNA, 30 nt, Homo sapiens
  source 1..30: mol_type = unassigned RNA
tttttttacaaagattgtaaagcaacgcct

SEQ ID NO: 4025 - RNA, 30 nt, Homo sapiens
  source 1..30: mol_type = unassigned RNA
ttttttttacaaagattgtaaagcaacgcc

SEQ ID NO: 4026 - RNA, 30 nt, Homo sapiens
  source 1..30: mol_type = unassigned RNA
tttttttttacaaagattgtaaagcaacgc

SEQ ID NO: 4027 - RNA, 30 nt, Homo sapiens
  source 1..30: mol_type = unassigned RNA
ttttttttttacaaagattgtaaagcaacg

SEQ ID NO: 4028 - RNA, 30 nt, Homo sapiens
  source 1..30: mol_type = unassigned RNA
cctaggactgaatgatttttttttttttac

SEQ ID NO: 4029 - RNA, 30 nt, Homo sapiens
  source 1..30: mol_type = unassigned RNA
tagggcaaaaatattgcctaggactgaatg

SEQ ID NO: 4030 - RNA, 30 nt, Homo sapiens
  source 1..30: mol_type = unassigned RNA
atagggcaaaaatattgcctaggactgaat

SEQ ID NO: 4031 - RNA, 30 nt, Homo sapiens
  source 1..30: mol_type = unassigned RNA
accattagtacaagtacccaatataacaat

SEQ ID NO: 4032 - RNA, 30 nt, Homo sapiens
  source 1..30: mol_type = unassigned RNA
tatagggcaaaaatattgcctaggactgaa

SEQ ID NO: 4033 - RNA, 30 nt, Homo sapiens
  source 1..30: mol_type = unassigned RNA
gtacaagtacccaatataacaatagatcat

SEQ ID NO: 4034 - RNA, 30 nt, Homo sapiens
  source 1..30: mol_type = unassigned RNA
agttgtatgtctttatatcaggataaagag

SEQ ID NO: 4035 - RNA, 30 nt, Homo sapiens
  source 1..30: mol_type = unassigned RNA
cttatgaaatgcagccataaagtttaactt

SEQ ID NO: 4036 - RNA, 30 nt, Homo sapiens
  source 1..30: mol_type = unassigned RNA
ccttatgaaatgcagccataaagtttaact

SEQ ID NO: 4037 - RNA, 30 nt, Homo sapiens
  source 1..30: mol_type = unassigned RNA
tccttatgaaatgcagccataaagtttaac

SEQ ID NO: 4038 - RNA, 30 nt, Homo sapiens
  source 1..30: mol_type = unassigned RNA
ttccttatgaaatgcagccataaagtttaa

SEQ ID NO: 4039 - RNA, 30 nt, Homo sapiens
  source 1..30: mol_type = unassigned RNA
tttccttatgaaatgcagccataaagttta

SEQ ID NO: 4040 - RNA, 30 nt, Homo sapiens
  source 1..30: mol_type = unassigned RNA
ttttccttatgaaatgcagccataaagttt

SEQ ID NO: 4041 - RNA, 30 nt, Homo sapiens
  source 1..30: mol_type = unassigned RNA
tttttccttatgaaatgcagccataaagtt

SEQ ID NO: 4042 - RNA, 30 nt, Homo sapiens
  source 1..30: mol_type = unassigned RNA
gaagttttttttccttatgaaatgcagcca

SEQ ID NO: 4043 - RNA, 30 nt, Homo sapiens
  source 1..30: mol_type = unassigned RNA
ggaagttttttttccttatgaaatgcagcc

SEQ ID NO: 4044 - RNA, 30 nt, Homo sapiens
  source 1..30: mol_type = unassigned RNA
tactctgtctttggaagttttttttcctta

SEQ ID NO: 4045 - RNA, 30 nt, Homo sapiens
  source 1..30: mol_type = unassigned RNA
gcattctactctgtctttggaagttttttt

SEQ ID NO: 4046 - RNA, 30 nt, Homo sapiens
  source 1..30: mol_type = unassigned RNA
ttagcattctactctgtctttggaagtttt

SEQ ID NO: 4047 - RNA, 30 nt, Homo sapiens
  source 1..30: mol_type = unassigned RNA
attagcattctactctgtctttggaagttt

SEQ ID NO: 4048 - RNA, 30 nt, Homo sapiens
  source 1..30: mol_type = unassigned RNA
tattagcattctactctgtctttggaagtt

SEQ ID NO: 4049 - RNA, 30 nt, Homo sapiens
  source 1..30: mol_type = unassigned RNA
ttattagcattctactctgtctttggaagt

SEQ ID NO: 4050 - RNA, 30 nt, Homo sapiens
  source 1..30: mol_type = unassigned RNA
aatttttattagcattctactctgtctttg

SEQ ID NO: 4051 - RNA, 30 nt, Homo sapiens
  source 1..30: mol_type = unassigned RNA
aagtgtaaattaaatttttattagcattct

SEQ ID NO: 4052 - RNA, 30 nt, Homo sapiens
  source 1..30: mol_type = unassigned RNA
caagagagcatgttaaagtgtaaattaaat

SEQ ID NO: 4053 - RNA, 30 nt, Homo sapiens
  source 1..30: mol_type = unassigned RNA
acaagagagcatgttaaagtgtaaattaaa

SEQ ID NO: 4054 - RNA, 30 nt, Homo sapiens
  source 1..30: mol_type = unassigned RNA
tacaagagagcatgttaaagtgtaaattaa

SEQ ID NO: 4055 - RNA, 30 nt, Homo sapiens
  source 1..30: mol_type = unassigned RNA
tctaaacctagtcccacaaatacttttaca

SEQ ID NO: 4056 - RNA, 30 nt, Homo sapiens
  source 1..30: mol_type = unassigned RNA
atctaaacctagtcccacaaatacttttac

SEQ ID NO: 4057 - RNA, 30 nt, Homo sapiens
  source 1..30: mol_type = unassigned RNA
agtgaaatttatctaaacctagtcccacaa

SEQ ID NO: 4058 - RNA, 30 nt, Homo sapiens
  source 1..30: mol_type = unassigned RNA
tatcaggataaagagaattgagtgaaattt

SEQ ID NO: 4059 - RNA, 30 nt, Homo sapiens
  source 1..30: mol_type = unassigned RNA
atatcaggataaagagaattgagtgaaatt

SEQ ID NO: 4060 - RNA, 30 nt, Homo sapiens
  source 1..30: mol_type = unassigned RNA
tatgtctttatatcaggataaagagaattg

SEQ ID NO: 4061 - RNA, 30 nt, Homo sapiens
  source 1..30: mol_type = unassigned RNA
gttgtatgtctttatatcaggataaagaga

SEQ ID NO: 4062 - RNA, 30 nt, Homo sapiens
  source 1..30: mol_type = unassigned RNA
tagttgtatgtctttatatcaggataaaga

SEQ ID NO: 4063 - RNA, 30 nt, Homo sapiens
  source 1..30: mol_type = unassigned RNA
ttatagggcaaaaatattgcctaggactga

SEQ ID NO: 4064 - RNA, 30 nt, Homo sapiens
  source 1..30: mol_type = unassigned RNA
tttttatagggcaaaaatattgcctaggac

SEQ ID NO: 4065 - RNA, 30 nt, Homo sapiens
  source 1..30: mol_type = unassigned RNA
atttttatagggcaaaaatattgcctagga

SEQ ID NO: 4066 - RNA, 30 nt, Homo sapiens
  source 1..30: mol_type = unassigned RNA
agccatcattttgctggtcatgtggaaata

SEQ ID NO: 4067 - RNA, 30 nt, Homo sapiens
  source 1..30: mol_type = unassigned RNA
cagccatcattttgctggtcatgtggaaat

SEQ ID NO: 4068 - RNA, 30 nt, Homo sapiens
  source 1..30: mol_type = unassigned RNA
atgcatttcagccatcattttgctggtcat

SEQ ID NO: 4069 - RNA, 30 nt, Homo sapiens
  source 1..30: mol_type = unassigned RNA
attaatgcatttcagccatcattttgctgg

SEQ ID NO: 4070 - RNA, 30 nt, Homo sapiens
  source 1..30: mol_type = unassigned RNA
tatgagtgtaaaggttaattaatgcatttc

SEQ ID NO: 4071 - RNA, 30 nt, Homo sapiens
  source 1..30: mol_type = unassigned RNA
atatgagtgtaaaggttaattaatgcattt

SEQ ID NO: 4072 - RNA, 30 nt, Homo sapiens
  source 1..30: mol_type = unassigned RNA
tatatgagtgtaaaggttaattaatgcatt

SEQ ID NO: 4073 - RNA, 30 nt, Homo sapiens
  source 1..30: mol_type = unassigned RNA
tcacaaaacacttttatatgagtgtaaagg

SEQ ID NO: 4074 - RNA, 30 nt, Homo sapiens
  source 1..30: mol_type = unassigned RNA
ttctcacaaaacacttttatatgagtgtaa

SEQ ID NO: 4075 - RNA, 30 nt, Homo sapiens
  source 1..30: mol_type = unassigned RNA
gttctcacaaaacacttttatatgagtgta

SEQ ID NO: 4076 - RNA, 30 nt, Homo sapiens
  source 1..30: mol_type = unassigned RNA
tgtacatttgttctcacaaaacacttttat

SEQ ID NO: 4077 - RNA, 30 nt, Homo sapiens
  source 1..30: mol_type = unassigned RNA
gtgtacatttgttctcacaaaacactttta

SEQ ID NO: 4078 - RNA, 30 nt, Homo sapiens
  source 1..30: mol_type = unassigned RNA
aagataacatttgtgtacatttgttctcac

SEQ ID NO: 4079 - RNA, 30 nt, Homo sapiens
  source 1..30: mol_type = unassigned RNA
gtcatgattaaagataacatttgtgtacat

SEQ ID NO: 4080 - RNA, 30 nt, Homo sapiens
  source 1..30: mol_type = unassigned RNA
ttagtcatgattaaagataacatttgtgta

SEQ ID NO: 4081 - RNA, 30 nt, Homo sapiens
  source 1..30: mol_type = unassigned RNA
attagtcatgattaaagataacatttgtgt

SEQ ID NO: 4082 - RNA, 30 nt, Homo sapiens
  source 1..30: mol_type = unassigned RNA
tattagtcatgattaaagataacatttgtg

SEQ ID NO: 4083 - RNA, 30 nt, Homo sapiens
  source 1..30: mol_type = unassigned RNA
ttattagtcatgattaaagataacatttgt

SEQ ID NO: 4084 - RNA, 30 nt, Homo sapiens
  source 1..30: mol_type = unassigned RNA
taatatccatttttattagtcatgattaaa

SEQ ID NO: 4085 - RNA, 30 nt, Homo sapiens
  source 1..30: mol_type = unassigned RNA
ataatatccatttttattagtcatgattaa

SEQ ID NO: 4086 - RNA, 30 nt, Homo sapiens
  source 1..30: mol_type = unassigned RNA
tgtttataatatccatttttattagtcatg

SEQ ID NO: 4087 - RNA, 30 nt, Homo sapiens
  source 1..30: mol_type = unassigned RNA
cagtagtaaagcttgtgtttataatatcca

SEQ ID NO: 4088 - RNA, 30 nt, Homo sapiens
  source 1..30: mol_type = unassigned RNA
gcagtagtaaagcttgtgtttataatatcc

SEQ ID NO: 4089 - RNA, 30 nt, Homo sapiens
  source 1..30: mol_type = unassigned RNA
tcaaggagacatttgcagtagtaaagcttg

SEQ ID NO: 4090 - RNA, 30 nt, Homo sapiens
  source 1..30: mol_type = unassigned RNA
gtcaaggagacatttgcagtagtaaagctt

SEQ ID NO: 4091 - RNA, 30 nt, Homo sapiens
  source 1..30: mol_type = unassigned RNA
ataaaggaatcaggccctgtcatttgtcaa

SEQ ID NO: 4092 - RNA, 30 nt, Homo sapiens
  source 1..30: mol_type = unassigned RNA
aataaaggaatcaggccctgtcatttgtca

SEQ ID NO: 4093 - RNA, 30 nt, Homo sapiens
  source 1..30: mol_type = unassigned RNA
tgctggtcatgtggaaatatagcttcttta

SEQ ID NO: 4094 - RNA, 30 nt, Homo sapiens
  source 1..30: mol_type = unassigned RNA
gctggtcatgtggaaatatagcttctttag

SEQ ID NO: 4095 - RNA, 30 nt, Homo sapiens
  source 1..30: mol_type = unassigned RNA
ctggtcatgtggaaatatagcttctttagg

SEQ ID NO: 4096 - RNA, 30 nt, Homo sapiens
  source 1..30: mol_type = unassigned RNA
tttaggaattgtacttagagtaggagccac

SEQ ID NO: 4097 - RNA, 30 nt, Homo sapiens
  source 1..30: mol_type = unassigned RNA
aaataatttatttttatagggcaaaaatat

SEQ ID NO: 4098 - RNA, 30 nt, Homo sapiens
  source 1..30: mol_type = unassigned RNA
aaaataatttatttttatagggcaaaaata

SEQ ID NO: 4099 - RNA, 30 nt, Homo sapiens
  source 1..30: mol_type = unassigned RNA
tcatagagcacatttaaaataatttatttt

SEQ ID NO: 4100 - RNA, 30 nt, Homo sapiens
  source 1..30: mol_type = unassigned RNA
cagttctcatagagcacatttaaaataatt

SEQ ID NO: 4101 - RNA, 30 nt, Homo sapiens
  source 1..30: mol_type = unassigned RNA
tggcaagaaatagataattacagttctcat

SEQ ID NO: 4102 - RNA, 30 nt, Homo sapiens
  source 1..30: mol_type = unassigned RNA
atggcaagaaatagataattacagttctca

SEQ ID NO: 4103 - RNA, 30 nt, Homo sapiens
  source 1..30: mol_type = unassigned RNA
tatggcaagaaatagataattacagttctc

SEQ ID NO: 4104 - RNA, 30 nt, Homo sapiens
  source 1..30: mol_type = unassigned RNA
ttttatggcaagaaatagataattacagtt

SEQ ID NO: 4105 - RNA, 30 nt, Homo sapiens
  source 1..30: mol_type = unassigned RNA
attttatggcaagaaatagataattacagt

SEQ ID NO: 4106 - RNA, 30 nt, Homo sapiens
  source 1..30: mol_type = unassigned RNA
aaaatttattttatggcaagaaatagataa

SEQ ID NO: 4107 - RNA, 30 nt, Homo sapiens
  source 1..30: mol_type = unassigned RNA
caaaatttattttatggcaagaaatagata

SEQ ID NO: 4108 - RNA, 30 nt, Homo sapiens
  source 1..30: mol_type = unassigned RNA
tgggtttcaaaatttattttatggcaagaa

SEQ ID NO: 4109 - RNA, 30 nt, Homo sapiens
  source 1..30: mol_type = unassigned RNA
atactctggaaagttatgggtttcaaaatt

SEQ ID NO: 4110 - RNA, 30 nt, Homo sapiens
  source 1..30: mol_type = unassigned RNA
tgaaatgcagccataaagtttaacttccat

SEQ ID NO: 4111 - RNA, 30 nt, Homo sapiens
  source 1..30: mol_type = unassigned RNA
aatactctggaaagttatgggtttcaaaat

SEQ ID NO: 4112 - RNA, 30 nt, Homo sapiens
  source 1..30: mol_type = unassigned RNA
ttgacctccagagtaaaatatttaatactc

SEQ ID NO: 4113 - RNA, 30 nt, Homo sapiens
  source 1..30: mol_type = unassigned RNA
ttgttgacctccagagtaaaatatttaata

SEQ ID NO: 4114 - RNA, 30 nt, Homo sapiens
  source 1..30: mol_type = unassigned RNA
tcacttgttgttgacctccagagtaaaata

SEQ ID NO: 4115 - RNA, 30 nt, Homo sapiens
  source 1..30: mol_type = unassigned RNA
ttctcacttgttgttgacctccagagtaaa

SEQ ID NO: 4116 - RNA, 30 nt, Homo sapiens
  source 1..30: mol_type = unassigned RNA
gttctcacttgttgttgacctccagagtaa

SEQ ID NO: 4117 - RNA, 30 nt, Homo sapiens
  source 1..30: mol_type = unassigned RNA
agtttgttctcacttgttgttgacctccag

SEQ ID NO: 4118 - RNA, 30 nt, Homo sapiens
  source 1..30: mol_type = unassigned RNA
aagtttgttctcacttgttgttgacctcca

SEQ ID NO: 4119 - RNA, 30 nt, Homo sapiens
  source 1..30: mol_type = unassigned RNA
taagtttgttctcacttgttgttgacctcc

SEQ ID NO: 4120 - RNA, 30 nt, Homo sapiens
  source 1..30: mol_type = unassigned RNA
tactataaaaccataacaaaaatattttaa

SEQ ID NO: 4121 - RNA, 30 nt, Homo sapiens
  source 1..30: mol_type = unassigned RNA
gagtaggagccacatattatactataaaac

SEQ ID NO: 4122 - RNA, 30 nt, Homo sapiens
  source 1..30: mol_type = unassigned RNA
tacttagagtaggagccacatattatacta

SEQ ID NO: 4123 - RNA, 30 nt, Homo sapiens
  source 1..30: mol_type = unassigned RNA
ggaattgtacttagagtaggagccacatat

SEQ ID NO: 4124 - RNA, 30 nt, Homo sapiens
  source 1..30: mol_type = unassigned RNA
aggaattgtacttagagtaggagccacata

SEQ ID NO: 4125 - RNA, 30 nt, Homo sapiens
  source 1..30: mol_type = unassigned RNA
acctccagagtaaaatatttaatactctgg

SEQ ID NO: 4126 - RNA, 30 nt, Homo sapiens
  source 1..30: mol_type = unassigned RNA
aacttccattaacaaagctgctcacagtaa

SEQ ID NO: 4127 - RNA, 30 nt, Homo sapiens
  source 1..30: mol_type = unassigned RNA
acttccattaacaaagctgctcacagtaaa

SEQ ID NO: 4128 - RNA, 30 nt, Homo sapiens
  source 1..30: mol_type = unassigned RNA
cattaacaaagctgctcacagtaaacctat

SEQ ID NO: 4129 - RNA, 30 nt, Homo sapiens
  source 1..30: mol_type = unassigned RNA
aaagattggtaaatttaagctcaaataatt

SEQ ID NO: 4130 - RNA, 30 nt, Homo sapiens
  source 1..30: mol_type = unassigned RNA
tttaaagattggtaaatttaagctcaaata

SEQ ID NO: 4131 - RNA, 30 nt, Homo sapiens
  source 1..30: mol_type = unassigned RNA
tcttatttaaagattggtaaatttaagctc

SEQ ID NO: 4132 - RNA, 30 nt, Homo sapiens
  source 1..30: mol_type = unassigned RNA
atataatccctctgagatgggcatactata

SEQ ID NO: 4133 - RNA, 30 nt, Homo sapiens
  source 1..30: mol_type = unassigned RNA
aatcttcatataatccctctgagatgggca

SEQ ID NO: 4134 - RNA, 30 nt, Homo sapiens
  source 1..30: mol_type = unassigned RNA
gaatcttcatataatccctctgagatgggc

SEQ ID NO: 4135 - RNA, 30 nt, Homo sapiens
  source 1..30: mol_type = unassigned RNA
tgaatcttcatataatccctctgagatggg

SEQ ID NO: 4136 - RNA, 30 nt, Homo sapiens
  source 1..30: mol_type = unassigned RNA
atccttttgaatcttcatataatccctctg

SEQ ID NO: 4137 - RNA, 30 nt, Homo sapiens
  source 1..30: mol_type = unassigned RNA
acctgcttcatccttttgaatcttcatata

SEQ ID NO: 4138 - RNA, 30 nt, Homo sapiens
  source 1..30: mol_type = unassigned RNA
gaaaacattcacctgcttcatccttttgaa

SEQ ID NO: 4139 - RNA, 30 nt, Homo sapiens
  source 1..30: mol_type = unassigned RNA
agaaaacattcacctgcttcatccttttga

SEQ ID NO: 4140 - RNA, 30 nt, Homo sapiens
  source 1..30: mol_type = unassigned RNA
tagaaaacattcacctgcttcatccttttg

SEQ ID NO: 4141 - RNA, 30 nt, Homo sapiens
  source 1..30: mol_type = unassigned RNA
ttagaaaacattcacctgcttcatcctttt

SEQ ID NO: 4142 - RNA, 30 nt, Homo sapiens
  source 1..30: mol_type = unassigned RNA
tcatttttagaaaacattcacctgcttcat

SEQ ID NO: 4143 - RNA, 30 nt, Homo sapiens
  source 1..30: mol_type = unassigned RNA
aatcgcatgatctatctatatgggaccttg

SEQ ID NO: 4144 - RNA, 30 nt, Homo sapiens
  source 1..30: mol_type = unassigned RNA
aaaagaaaaattaaatcgcatgatctatct

SEQ ID NO: 4145 - RNA, 30 nt, Homo sapiens
  source 1..30: mol_type = unassigned RNA
aaaggagcaggcaagcatagaagactaaaa

SEQ ID NO: 4146 - RNA, 30 nt, Homo sapiens
  source 1..30: mol_type = unassigned RNA
aaaaggagcaggcaagcatagaagactaaa

SEQ ID NO: 4147 - RNA, 30 nt, Homo sapiens
  source 1..30: mol_type = unassigned RNA
taaaaggagcaggcaagcatagaagactaa

SEQ ID NO: 4148 - RNA, 30 nt, Homo sapiens
  source 1..30: mol_type = unassigned RNA
ttaaaaggagcaggcaagcatagaagacta

SEQ ID NO: 4149 - RNA, 30 nt, Homo sapiens
  source 1..30: mol_type = unassigned RNA
tttaaaaggagcaggcaagcatagaagact

SEQ ID NO: 4150 - RNA, 30 nt, Homo sapiens
  source 1..30: mol_type = unassigned RNA
tatagttttttaaaaggagcaggcaagcat

SEQ ID NO: 4151 - RNA, 30 nt, Homo sapiens
  source 1..30: mol_type = unassigned RNA
ttatatagttttttaaaaggagcaggcaag

SEQ ID NO: 4152 - RNA, 30 nt, Homo sapiens
  source 1..30: mol_type = unassigned RNA
cttatatagttttttaaaaggagcaggcaa

SEQ ID NO: 4153 - RNA, 30 nt, Homo sapiens
  source 1..30: mol_type = unassigned RNA
tcttatatagttttttaaaaggagcaggca

SEQ ID NO: 4154 - RNA, 30 nt, Homo sapiens
  source 1..30: mol_type = unassigned RNA
ttcttatatagttttttaaaaggagcaggc

SEQ ID NO: 4155 - RNA, 30 nt, Homo sapiens
  source 1..30: mol_type = unassigned RNA
tttcttatatagttttttaaaaggagcagg

SEQ ID NO: 4156 - RNA, 30 nt, Homo sapiens
  source 1..30: mol_type = unassigned RNA
aagattggtaaatttaagctcaaataattt

SEQ ID NO: 4157 - RNA, 30 nt, Homo sapiens
  source 1..30: mol_type = unassigned RNA
gtaaatttaagctcaaataatttattcagt

SEQ ID NO: 4158 - RNA, 30 nt, Homo sapiens
  source 1..30: mol_type = unassigned RNA
aagctcaaataatttattcagtggcaagcc

SEQ ID NO: 4159 - RNA, 30 nt, Homo sapiens
  source 1..30: mol_type = unassigned RNA
agctcaaataatttattcagtggcaagcct

SEQ ID NO: 4160 - RNA, 30 nt, Homo sapiens
  source 1..30: mol_type = unassigned RNA
ttctgaagcctgtgccaggtattatgagaa

SEQ ID NO: 4161 - RNA, 30 nt, Homo sapiens
  source 1..30: mol_type = unassigned RNA
gattacattttatgtaattctaatccagct

SEQ ID NO: 4162 - RNA, 30 nt, Homo sapiens
  source 1..30: mol_type = unassigned RNA
gttctgaagcctgtgccaggtattatgaga

SEQ ID NO: 4163 - RNA, 30 nt, Homo sapiens
  source 1..30: mol_type = unassigned RNA
gagcaccaactttgttctgaagcctgtgcc

SEQ ID NO: 4164 - RNA, 30 nt, Homo sapiens
  source 1..30: mol_type = unassigned RNA
atagtcagtgtcactaactaaagtaaaata

SEQ ID NO: 4165 - RNA, 30 nt, Homo sapiens
  source 1..30: mol_type = unassigned RNA
aagtcattgatagtcagtgtcactaactaa

SEQ ID NO: 4166 - RNA, 30 nt, Homo sapiens
  source 1..30: mol_type = unassigned RNA
aaagtcattgatagtcagtgtcactaacta

SEQ ID NO: 4167 - RNA, 30 nt, Homo sapiens
  source 1..30: mol_type = unassigned RNA
agtttaaagtcattgatagtcagtgtcact

SEQ ID NO: 4168 - RNA, 30 nt, Homo sapiens
  source 1..30: mol_type = unassigned RNA
tcttcagtttaaagtcattgatagtcagtg

SEQ ID NO: 4169 - RNA, 30 nt, Homo sapiens
  source 1..30: mol_type = unassigned RNA
gtcttcagtttaaagtcattgatagtcagt

SEQ ID NO: 4170 - RNA, 30 nt, Homo sapiens
  source 1..30: mol_type = unassigned RNA
gcactccctccactgtcctgtaataaaaca

SEQ ID NO: 4171 - RNA, 30 nt, Homo sapiens
  source 1..30: mol_type = unassigned RNA
agcactccctccactgtcctgtaataaaac

SEQ ID NO: 4172 - RNA, 30 nt, Homo sapiens
  source 1..30: mol_type = unassigned RNA
atgcaaaataaggtttagcactccctccac

SEQ ID NO: 4173 - RNA, 30 nt, Homo sapiens
  source 1..30: mol_type = unassigned RNA
ttttcttatatagttttttaaaaggagcag

SEQ ID NO: 4174 - RNA, 30 nt, Homo sapiens
  source 1..30: mol_type = unassigned RNA
atacatatatacacattcatgcaaaataag

SEQ ID NO: 4175 - RNA, 30 nt, Homo sapiens
  source 1..30: mol_type = unassigned RNA
tatatcatgtatgtgcctatttcatacata

SEQ ID NO: 4176 - RNA, 30 nt, Homo sapiens
  source 1..30: mol_type = unassigned RNA
tatgtaatatataaatatgttatatatcat

SEQ ID NO: 4177 - RNA, 30 nt, Homo sapiens
  source 1..30: mol_type = unassigned RNA
atatgtaatatataaatatgttatatatca

SEQ ID NO: 4178 - RNA, 30 nt, Homo sapiens
  source 1..30: mol_type = unassigned RNA
cctatcaaaatatttatatgtaatatataa

SEQ ID NO: 4179 - RNA, 30 nt, Homo sapiens
  source 1..30: mol_type = unassigned RNA
acctatcaaaatatttatatgtaatatata

SEQ ID NO: 4180 - RNA, 30 nt, Homo sapiens
  source 1..30: mol_type = unassigned RNA
tttacctatcaaaatatttatatgtaatat

SEQ ID NO: 4181 - RNA, 30 nt, Homo sapiens
  source 1..30: mol_type = unassigned RNA
tgtatattatttacctatcaaaatatttat

SEQ ID NO: 4182 - RNA, 30 nt, Homo sapiens
  source 1..30: mol_type = unassigned RNA
catataataaagttgtgtatattatttacc

SEQ ID NO: 4183 - RNA, 30 nt, Homo sapiens
  source 1..30: mol_type = unassigned RNA
taacatataatatatatattacatataata

SEQ ID NO: 4184 - RNA, 30 nt, Homo sapiens
  source 1..30: mol_type = unassigned RNA
tatatatattataacatataatatatatat

SEQ ID NO: 4185 - RNA, 30 nt, Homo sapiens
  source 1..30: mol_type = unassigned RNA
agtggcaagcctcagaggcagactcggaac

SEQ ID NO: 4186 - RNA, 30 nt, Homo sapiens
  source 1..30: mol_type = unassigned RNA
ttcagtggcaagcctcagaggcagactcgg

SEQ ID NO: 4187 - RNA, 30 nt, Homo sapiens
  source 1..30: mol_type = unassigned RNA
attcagtggcaagcctcagaggcagactcg

SEQ ID NO: 4188 - RNA, 30 nt, Homo sapiens
  source 1..30: mol_type = unassigned RNA
catacatatatacacattcatgcaaaataa

SEQ ID NO: 4189 - RNA, 30 nt, Homo sapiens
  source 1..30: mol_type = unassigned RNA
taataaaggaatcaggccctgtcatttgtc

SEQ ID NO: 4190 - RNA, 30 nt, Homo sapiens
  source 1..30: mol_type = unassigned RNA
tgatgatttttttcttatatagttttttaa

SEQ ID NO: 4191 - RNA, 30 nt, Homo sapiens
  source 1..30: mol_type = unassigned RNA
tatttctgatgatttttttcttatatagtt

SEQ ID NO: 4192 - RNA, 30 nt, Homo sapiens
  source 1..30: mol_type = unassigned RNA
ttatttccaacaaaaatatctattgttatt

SEQ ID NO: 4193 - RNA, 30 nt, Homo sapiens
  source 1..30: mol_type = unassigned RNA
ctttttatttccaacaaaaatatctattgt

SEQ ID NO: 4194 - RNA, 30 nt, Homo sapiens
  source 1..30: mol_type = unassigned RNA
atgcagagttactttttatttccaacaaaa

SEQ ID NO: 4195 - RNA, 30 nt, Homo sapiens
  source 1..30: mol_type = unassigned RNA
ttaatgcagagttactttttatttccaaca

SEQ ID NO: 4196 - RNA, 30 nt, Homo sapiens
  source 1..30: mol_type = unassigned RNA
attaatgcagagttactttttatttccaac

SEQ ID NO: 4197 - RNA, 30 nt, Homo sapiens
  source 1..30: mol_type = unassigned RNA
tattaatgcagagttactttttatttccaa

SEQ ID NO: 4198 - RNA, 30 nt, Homo sapiens
  source 1..30: mol_type = unassigned RNA
ttattaatgcagagttactttttatttcca

SEQ ID NO: 4199 - RNA, 30 nt, Homo sapiens
  source 1..30: mol_type = unassigned RNA
tttttattaatgcagagttactttttattt

SEQ ID NO: 4200 - RNA, 30 nt, Homo sapiens
  source 1..30: mol_type = unassigned RNA
agaacataattatttttattaatgcagagt

SEQ ID NO: 4201 - RNA, 30 nt, Homo sapiens
  source 1..30: mol_type = unassigned RNA
cagcctccctgggaactctgcttcagaaca

SEQ ID NO: 4202 - RNA, 30 nt, Homo sapiens
  source 1..30: mol_type = unassigned RNA
ttgcagcctccctgggaactctgcttcaga

SEQ ID NO: 4203 - RNA, 30 nt, Homo sapiens
  source 1..30: mol_type = unassigned RNA
ggatagacttattgcagcctccctgggaac

SEQ ID NO: 4204 - RNA, 30 nt, Homo sapiens
  source 1..30: mol_type = unassigned RNA
aggatagacttattgcagcctccctgggaa

SEQ ID NO: 4205 - RNA, 30 nt, Homo sapiens
  source 1..30: mol_type = unassigned RNA
taggatagacttattgcagcctccctggga

SEQ ID NO: 4206 - RNA, 30 nt, Homo sapiens
  source 1..30: mol_type = unassigned RNA
atcatctcaggcacttttaggatagactta

SEQ ID NO: 4207 - RNA, 30 nt, Homo sapiens
  source 1..30: mol_type = unassigned RNA
ccagactctcgggaagaacattaatcatct

SEQ ID NO: 4208 - RNA, 30 nt, Homo sapiens
  source 1..30: mol_type = unassigned RNA
tcatttccagactctcgggaagaacattaa

SEQ ID NO: 4209 - RNA, 30 nt, Homo sapiens
  source 1..30: mol_type = unassigned RNA
caaaactgagaccagaaaatcccatcaaga

SEQ ID NO: 4210 - RNA, 30 nt, Homo sapiens
  source 1..30: mol_type = unassigned RNA
actgttacaaaactgagaccagaaaatccc

SEQ ID NO: 4211 - RNA, 30 nt, Homo sapiens
  source 1..30: mol_type = unassigned RNA
taatatattgactgttacaaaactgagacc

SEQ ID NO: 4212 - RNA, 30 nt, Homo sapiens
  source 1..30: mol_type = unassigned RNA
ctagtgaggagcaacctaactcacacgaaa

SEQ ID NO: 4213 - RNA, 30 nt, Homo sapiens
  source 1..30: mol_type = unassigned RNA
ggcttcctagtgaggagcaacctaactcac

SEQ ID NO: 4214 - RNA, 30 nt, Homo sapiens
  source 1..30: mol_type = unassigned RNA
gggcttcctagtgaggagcaacctaactca

SEQ ID NO: 4215 - RNA, 30 nt, Homo sapiens
  source 1..30: mol_type = unassigned RNA
ccagtttgggcttcctagtgaggagcaacc

SEQ ID NO: 4216 - RNA, 30 nt, Homo sapiens
  source 1..30: mol_type = unassigned RNA
cccagtttgggcttcctagtgaggagcaac

SEQ ID NO: 4217 - RNA, 30 nt, Homo sapiens
  source 1..30: mol_type = unassigned RNA
taataatagtttcccagtttgggcttccta

SEQ ID NO: 4218 - RNA, 30 nt, Homo sapiens
  source 1..30: mol_type = unassigned RNA
acaaagctgctcacagtaaacctattataa

SEQ ID NO: 4219 - RNA, 30 nt, Homo sapiens
  source 1..30: mol_type = unassigned RNA
tatttccaacaaaaatatctattgttatta

SEQ ID NO: 4220 - RNA, 30 nt, Homo sapiens
  source 1..30: mol_type = unassigned RNA
atttccaacaaaaatatctattgttattat

SEQ ID NO: 4221 - RNA, 30 nt, Homo sapiens
  source 1..30: mol_type = unassigned RNA
tttccaacaaaaatatctattgttattatt

SEQ ID NO: 4222 - RNA, 30 nt, Homo sapiens
  source 1..30: mol_type = unassigned RNA
ccaacaaaaatatctattgttattatttaa

SEQ ID NO: 4223 - RNA, 30 nt, Homo sapiens
  source 1..30: mol_type = unassigned RNA
ttatatttctgatgatttttttcttatata

SEQ ID NO: 4224 - RNA, 30 nt, Homo sapiens
  source 1..30: mol_type = unassigned RNA
attatatttctgatgatttttttcttatat

SEQ ID NO: 4225 - RNA, 30 nt, Homo sapiens
  source 1..30: mol_type = unassigned RNA
tattatatttctgatgatttttttcttata

SEQ ID NO: 4226 - RNA, 30 nt, Homo sapiens
  source 1..30: mol_type = unassigned RNA
ttattatatttctgatgatttttttcttat

SEQ ID NO: 4227 - RNA, 30 nt, Homo sapiens
  source 1..30: mol_type = unassigned RNA
tctttttattatatttctgatgattttttt

SEQ ID NO: 4228 - RNA, 30 nt, Homo sapiens
  source 1..30: mol_type = unassigned RNA
aaaattatctttttattatatttctgatga

SEQ ID NO: 4229 - RNA, 30 nt, Homo sapiens
  source 1..30: mol_type = unassigned RNA
aaaaattatctttttattatatttctgatg

SEQ ID NO: 4230 - RNA, 30 nt, Homo sapiens
  source 1..30: mol_type = unassigned RNA
tcactttaaaaattatctttttattatatt

SEQ ID NO: 4231 - RNA, 30 nt, Homo sapiens
  source 1..30: mol_type = unassigned RNA
catgatcctgcactcttgtcactttaaaaa

SEQ ID NO: 4232 - RNA, 30 nt, Homo sapiens
  source 1..30: mol_type = unassigned RNA
atgacatattacatgatcctgcactcttgt

SEQ ID NO: 4233 - RNA, 30 nt, Homo sapiens
  source 1..30: mol_type = unassigned RNA
aatgacatattacatgatcctgcactcttg

SEQ ID NO: 4234 - RNA, 30 nt, Homo sapiens
  source 1..30: mol_type = unassigned RNA
taatgacatattacatgatcctgcactctt

SEQ ID NO: 4235 - RNA, 30 nt, Homo sapiens
  source 1..30: mol_type = unassigned RNA
tagtcttttaatgacatattacatgatcct

SEQ ID NO: 4236 - RNA, 30 nt, Homo sapiens
  source 1..30: mol_type = unassigned RNA
ctgatgatttttttcttatatagtttttta

SEQ ID NO: 4237 - RNA, 30 nt, Homo sapiens
  source 1..30: mol_type = unassigned RNA
ttctagtcttttaatgacatattacatgat

SEQ ID NO: 4238 - RNA, 30 nt, Homo sapiens
  source 1..30: mol_type = unassigned RNA
aaacacatgaaaaattaccaaagttgttct

SEQ ID NO: 4239 - RNA, 30 nt, Homo sapiens
  source 1..30: mol_type = unassigned RNA
tcataataaatattcaaacacatgaaaaat

SEQ ID NO: 4240 - RNA, 30 nt, Homo sapiens
  source 1..30: mol_type = unassigned RNA
gcacccttctcataataaatattcaaacac

SEQ ID NO: 4241 - RNA, 30 nt, Homo sapiens
  source 1..30: mol_type = unassigned RNA
caattagcacccttctcataataaatattc

SEQ ID NO: 4242 - RNA, 30 nt, Homo sapiens
  source 1..30: mol_type = unassigned RNA
tctgagaaattccaattagcacccttctca

SEQ ID NO: 4243 - RNA, 30 nt, Homo sapiens
  source 1..30: mol_type = unassigned RNA
atctgagaaattccaattagcacccttctc

SEQ ID NO: 4244 - RNA, 30 nt, Homo sapiens
  source 1..30: mol_type = unassigned RNA
cagctttatctgagaaattccaattagcac

SEQ ID NO: 4245 - RNA, 30 nt, Homo sapiens
  source 1..30: mol_type = unassigned RNA
agtcttacagctttatctgagaaattccaa

SEQ ID NO: 4246 - RNA, 30 nt, Homo sapiens
  source 1..30: mol_type = unassigned RNA
aagtcttacagctttatctgagaaattcca

SEQ ID NO: 4247 - RNA, 30 nt, Homo sapiens
  source 1..30: mol_type = unassigned RNA
tttaagtcttacagctttatctgagaaatt

SEQ ID NO: 4248 - RNA, 30 nt, Homo sapiens
  source 1..30: mol_type = unassigned RNA
ttatttaagtcttacagctttatctgagaa

SEQ ID NO: 4249 - RNA, 30 nt, Homo sapiens
  source 1..30: mol_type = unassigned RNA
ttattatttaagtcttacagctttatctga

SEQ ID NO: 4250 - RNA, 30 nt, Homo sapiens
  source 1..30: mol_type = unassigned RNA
caacaaaaatatctattgttattatttaag

SEQ ID NO: 4251 - RNA, 30 nt, Homo sapiens
  source 1..30: mol_type = unassigned RNA
ccaaagttgttctagtcttttaatgacata

SEQ ID NO: 4252 - RNA, 30 nt, Homo sapiens
  source 1..30: mol_type = unassigned RNA
tcttttaataaaggaatcaggccctgtcat

SEQ ID NO: 4253 - RNA, 30 nt, Homo sapiens
  source 1..30: mol_type = unassigned RNA
cagactctcgggaagaacattaatcatctc

SEQ ID NO: 4254 - RNA, 30 nt, Homo sapiens
  source 1..30: mol_type = unassigned RNA
aattatcttttaataaaggaatcaggccct

SEQ ID NO: 4255 - RNA, 30 nt, Homo sapiens
  source 1..30: mol_type = unassigned RNA
attattcaattctaactttctaaggaagtc

SEQ ID NO: 4256 - RNA, 30 nt, Homo sapiens
  source 1..30: mol_type = unassigned RNA
tctaagccaataaaggatcttcattattca

SEQ ID NO: 4257 - RNA, 30 nt, Homo sapiens
  source 1..30: mol_type = unassigned RNA
tgcttatctaagccaataaaggatcttcat

SEQ ID NO: 4258 - RNA, 30 nt, Homo sapiens
  source 1..30: mol_type = unassigned RNA
ttctgcttatctaagccaataaaggatctt

SEQ ID NO: 4259 - RNA, 30 nt, Homo sapiens
  source 1..30: mol_type = unassigned RNA
cttctgcttatctaagccaataaaggatct

SEQ ID NO: 4260 - RNA, 30 nt, Homo sapiens
  source 1..30: mol_type = unassigned RNA
tcttctgcttatctaagccaataaaggatc

SEQ ID NO: 4261 - RNA, 30 nt, Homo sapiens
  source 1..30: mol_type = unassigned RNA
aaaagagtgttttcttctgcttatctaagc

SEQ ID NO: 4262 - RNA, 30 nt, Homo sapiens
  source 1..30: mol_type = unassigned RNA
gaaaagagtgttttcttctgcttatctaag

SEQ ID NO: 4263 - RNA, 30 nt, Homo sapiens
  source 1..30: mol_type = unassigned RNA
agtatgactgtatatttgaaaagagtgttt

SEQ ID NO: 4264 - RNA, 30 nt, Homo sapiens
  source 1..30: mol_type = unassigned RNA
ttgagtatgactgtatatttgaaaagagtg

SEQ ID NO: 4265 - RNA, 30 nt, Homo sapiens
  source 1..30: mol_type = unassigned RNA
attgagtatgactgtatatttgaaaagagt

SEQ ID NO: 4266 - RNA, 30 nt, Homo sapiens
  source 1..30: mol_type = unassigned RNA
agaatttattgagtatgactgtatatttga

SEQ ID NO: 4267 - RNA, 30 nt, Homo sapiens
  source 1..30: mol_type = unassigned RNA
ttaagaatttattgagtatgactgtatatt

SEQ ID NO: 4268 - RNA, 30 nt, Homo sapiens
  source 1..30: mol_type = unassigned RNA
ctgaataccatgtgagaaaattcttaagaa

SEQ ID NO: 4269 - RNA, 30 nt, Homo sapiens
  source 1..30: mol_type = unassigned RNA
ttcctgaataccatgtgagaaaattcttaa

SEQ ID NO: 4270 - RNA, 30 nt, Homo sapiens
  source 1..30: mol_type = unassigned RNA
cttcctgaataccatgtgagaaaattctta

SEQ ID NO: 4271 - RNA, 30 nt, Homo sapiens
  source 1..30: mol_type = unassigned RNA
taagagtatttcttcctgaataccatgtga

SEQ ID NO: 4272 - RNA, 30 nt, Homo sapiens
  source 1..30: mol_type = unassigned RNA
ttctaagagtatttcttcctgaataccatg

SEQ ID NO: 4273 - RNA, 30 nt, Homo sapiens
  source 1..30: mol_type = unassigned RNA
ccaaattattctaagagtatttcttcctga

SEQ ID NO: 4274 - RNA, 30 nt, Homo sapiens
  source 1..30: mol_type = unassigned RNA
accaaattattctaagagtatttcttcctg

SEQ ID NO: 4275 - RNA, 30 nt, Homo sapiens
  source 1..30: mol_type = unassigned RNA
tttaccaaattattctaagagtatttcttc

SEQ ID NO: 4276 - RNA, 30 nt, Homo sapiens
  source 1..30: mol_type = unassigned RNA
ttatttaccaaattattctaagagtatttc

SEQ ID NO: 4277 - RNA, 30 nt, Homo sapiens
  source 1..30: mol_type = unassigned RNA
attatttaccaaattattctaagagtattt

SEQ ID NO: 4278 - RNA, 30 nt, Homo sapiens
  source 1..30: mol_type = unassigned RNA
tatttattatttaccaaattattctaagag

SEQ ID NO: 4279 - RNA, 30 nt, Homo sapiens
  source 1..30: mol_type = unassigned RNA
ctgtctcaatatatcttatatttattattt

SEQ ID NO: 4280 - RNA, 30 nt, Homo sapiens
  source 1..30: mol_type = unassigned RNA
aaacaaaagattgctgtctcaatatatctt

SEQ ID NO: 4281 - RNA, 30 nt, Homo sapiens
  source 1..30: mol_type = unassigned RNA
tgaatagcaatactgaagaaattaaaacaa

SEQ ID NO: 4282 - RNA, 30 nt, Homo sapiens
  source 1..30: mol_type = unassigned RNA
ttcaattctaactttctaaggaagtcaacc

SEQ ID NO: 4283 - RNA, 30 nt, Homo sapiens
  source 1..30: mol_type = unassigned RNA
aattctaactttctaaggaagtcaacctac

SEQ ID NO: 4284 - RNA, 30 nt, Homo sapiens
  source 1..30: mol_type = unassigned RNA
taactttctaaggaagtcaacctacagatc

SEQ ID NO: 4285 - RNA, 30 nt, Homo sapiens
  source 1..30: mol_type = unassigned RNA
ctaaggaagtcaacctacagatcagaaaga

SEQ ID NO: 4286 - RNA, 30 nt, Homo sapiens
  source 1..30: mol_type = unassigned RNA
caatttcttgtacattgaaggaaaggaaga

SEQ ID NO: 4287 - RNA, 30 nt, Homo sapiens
  source 1..30: mol_type = unassigned RNA
gcaatttcttgtacattgaaggaaaggaag

SEQ ID NO: 4288 - RNA, 30 nt, Homo sapiens
  source 1..30: mol_type = unassigned RNA
tgcaatttcttgtacattgaaggaaaggaa

SEQ ID NO: 4289 - RNA, 30 nt, Homo sapiens
  source 1..30: mol_type = unassigned RNA
ttgcaatttcttgtacattgaaggaaagga

SEQ ID NO: 4290 - RNA, 30 nt, Homo sapiens
  source 1..30: mol_type = unassigned RNA
catttttgcaatttcttgtacattgaagga

SEQ ID NO: 4291 - RNA, 30 nt, Homo sapiens
  source 1..30: mol_type = unassigned RNA
ccatttttgcaatttcttgtacattgaagg

SEQ ID NO: 4292 - RNA, 30 nt, Homo sapiens
  source 1..30: mol_type = unassigned RNA
agggtctctcagaagctgggaaactttcca

SEQ ID NO: 4293 - RNA, 30 nt, Homo sapiens
  source 1..30: mol_type = unassigned RNA
cagggtctctcagaagctgggaaactttcc

SEQ ID NO: 4294 - RNA, 30 nt, Homo sapiens
  source 1..30: mol_type = unassigned RNA
atttcagggtctctcagaagctgggaaact

SEQ ID NO: 4295 - RNA, 30 nt, Homo sapiens
  source 1..30: mol_type = unassigned RNA
acagttcatttcagggtctctcagaagctg

SEQ ID NO: 4296 - RNA, 30 nt, Homo sapiens
  source 1..30: mol_type = unassigned RNA
ttaacagttcatttcagggtctctcagaag

SEQ ID NO: 4297 - RNA, 30 nt, Homo sapiens
  source 1..30: mol_type = unassigned RNA
ttgttaacagttcatttcagggtctctcag

SEQ ID NO: 4298 - RNA, 30 nt, Homo sapiens
  source 1..30: mol_type = unassigned RNA
agttgttgttaacagttcatttcagggtct

SEQ ID NO: 4299 - RNA, 30 nt, Homo sapiens
  source 1..30: mol_type = unassigned RNA
atgaatagcaatactgaagaaattaaaaca

SEQ ID NO: 4300 - RNA, 30 nt, Homo sapiens
  source 1..30: mol_type = unassigned RNA
gccattcagttgttgttaacagttcatttc

SEQ ID NO: 4301 - RNA, 30 nt, Homo sapiens
  source 1..30: mol_type = unassigned RNA
ctcaacacaaagttggactaagtctcaaag

SEQ ID NO: 4302 - RNA, 30 nt, Homo sapiens
  source 1..30: mol_type = unassigned RNA
cagaatatactgttactcaacacaaagttg

SEQ ID NO: 4303 - RNA, 30 nt, Homo sapiens
  source 1..30: mol_type = unassigned RNA
gcagaatatactgttactcaacacaaagtt

SEQ ID NO: 4304 - RNA, 30 nt, Homo sapiens
  source 1..30: mol_type = unassigned RNA
agggtttgcagaatatactgttactcaaca

SEQ ID NO: 4305 - RNA, 30 nt, Homo sapiens
  source 1..30: mol_type = unassigned RNA
ccaaatagggcactaaaaacatgatcccaa

SEQ ID NO: 4306 - RNA, 30 nt, Homo sapiens
  source 1..30: mol_type = unassigned RNA
cccaaatagggcactaaaaacatgatccca

SEQ ID NO: 4307 - RNA, 30 nt, Homo sapiens
  source 1..30: mol_type = unassigned RNA
aaaaatataacatttcccaaatagggcact

SEQ ID NO: 4308 - RNA, 30 nt, Homo sapiens
  source 1..30: mol_type = unassigned RNA
tgctgcaaaaatgatacaatacacgaaata

SEQ ID NO: 4309 - RNA, 30 nt, Homo sapiens
  source 1..30: mol_type = unassigned RNA
tggaaatattatgctgcaaaaatgatacaa

SEQ ID NO: 4310 - RNA, 30 nt, Homo sapiens
  source 1..30: mol_type = unassigned RNA
ctggaaatattatgctgcaaaaatgataca

SEQ ID NO: 4311 - RNA, 30 nt, Homo sapiens
  source 1..30: mol_type = unassigned RNA
ccacctttctggaaatattatgctgcaaaa

SEQ ID NO: 4312 - RNA, 30 nt, Homo sapiens
  source 1..30: mol_type = unassigned RNA
aaggaatagcatcaaagacatagtcaggtc

SEQ ID NO: 4313 - RNA, 30 nt, Homo sapiens
  source 1..30: mol_type = unassigned RNA
taaggaagtcaacctacagatcagaaagag

SEQ ID NO: 4314 - RNA, 30 nt, Homo sapiens
  source 1..30: mol_type = unassigned RNA
gactaagtctcaaagttagccattcagttg

SEQ ID NO: 4315 - RNA, 30 nt, Homo sapiens
  source 1..30: mol_type = unassigned RNA
cttgtacattgaaggaaaggaagacacact

SEQ ID NO: 4316 - RNA, 30 nt, Homo sapiens
  source 1..30: mol_type = unassigned RNA
ctatcatttatgaatagcaatactgaagaa

SEQ ID NO: 4317 - RNA, 30 nt, Homo sapiens
  source 1..30: mol_type = unassigned RNA
tggcacagttgacaaggatgataaatcaat

SEQ ID NO: 4318 - RNA, 30 nt, Homo sapiens
  source 1..30: mol_type = unassigned RNA
agggatattaacttgtaatatacaggtatc

SEQ ID NO: 4319 - RNA, 30 nt, Homo sapiens
  source 1..30: mol_type = unassigned RNA
tagggatattaacttgtaatatacaggtat

SEQ ID NO: 4320 - RNA, 30 nt, Homo sapiens
  source 1..30: mol_type = unassigned RNA
tgaccactaaacacatcagttttagggata

SEQ ID NO: 4321 - RNA, 30 nt, Homo sapiens
  source 1..30: mol_type = unassigned RNA
cgaacaagctcccagatgatgctgattctg

SEQ ID NO: 4322 - RNA, 30 nt, Homo sapiens
  source 1..30: mol_type = unassigned RNA
tgtcttccgaacaagctcccagatgatgct

SEQ ID NO: 4323 - RNA, 30 nt, Homo sapiens
  source 1..30: mol_type = unassigned RNA
aggcagacattctgtcttccgaacaagctc

SEQ ID NO: 4324 - RNA, 30 nt, Homo sapiens
  source 1..30: mol_type = unassigned RNA
aatacatctggcttgaggcagacattctgt

SEQ ID NO: 4325 - RNA, 30 nt, Homo sapiens
  source 1..30: mol_type = unassigned RNA
tgattcaatacatctggcttgaggcagaca

SEQ ID NO: 4326 - RNA, 30 nt, Homo sapiens
  source 1..30: mol_type = unassigned RNA
aaatgcaaattctgattcaatacatctggc

SEQ ID NO: 4327 - RNA, 30 nt, Homo sapiens
  source 1..30: mol_type = unassigned RNA
attaaaatgcaaattctgattcaatacatc

SEQ ID NO: 4328 - RNA, 30 nt, Homo sapiens
  source 1..30: mol_type = unassigned RNA
cattaaaatgcaaattctgattcaatacat

SEQ ID NO: 4329 - RNA, 30 nt, Homo sapiens
  source 1..30: mol_type = unassigned RNA
tcattaaaatgcaaattctgattcaataca

SEQ ID NO: 4330 - RNA, 30 nt, Homo sapiens
  source 1..30: mol_type = unassigned RNA
attttcattaaaatgcaaattctgattcaa

SEQ ID NO: 4331 - RNA, 30 nt, Homo sapiens
  source 1..30: mol_type = unassigned RNA
gattttcattaaaatgcaaattctgattca

SEQ ID NO: 4332 - RNA, 30 nt, Homo sapiens
  source 1..30: mol_type = unassigned RNA
cctttgattttcattaaaatgcaaattctg

SEQ ID NO: 4333 - RNA, 30 nt, Homo sapiens
  source 1..30: mol_type = unassigned RNA
atgtgcatatgaattacctttgattttcat

SEQ ID NO: 4334 - RNA, 30 nt, Homo sapiens
  source 1..30: mol_type = unassigned RNA
gatgtgcatatgaattacctttgattttca

SEQ ID NO: 4335 - RNA, 30 nt, Homo sapiens
  source 1..30: mol_type = unassigned RNA
ctcaaactttgatgtgcatatgaattacct

SEQ ID NO: 4336 - RNA, 30 nt, Homo sapiens
  source 1..30: mol_type = unassigned RNA
ctgtgttcctcaaactttgatgtgcatatg

SEQ ID NO: 4337 - RNA, 30 nt, Homo sapiens
  source 1..30: mol_type = unassigned RNA
atagtgtcatattactgtgttcctcaaact

SEQ ID NO: 4338 - RNA, 30 nt, Homo sapiens
  source 1..30: mol_type = unassigned RNA
aatagtgtcatattactgtgttcctcaaac

SEQ ID NO: 4339 - RNA, 30 nt, Homo sapiens
  source 1..30: mol_type = unassigned RNA
taatccagctataaaatatttaatagtgtc

SEQ ID NO: 4340 - RNA, 30 nt, Homo sapiens
  source 1..30: mol_type = unassigned RNA
tgtaattctaatccagctataaaatattta

SEQ ID NO: 4341 - RNA, 30 nt, Homo sapiens
  source 1..30: mol_type = unassigned RNA
atgtaattctaatccagctataaaatattt

SEQ ID NO: 4342 - RNA, 30 nt, Homo sapiens
  source 1..30: mol_type = unassigned RNA
attatcttttaataaaggaatcaggccctg

SEQ ID NO: 4343 - RNA, 30 nt, Homo sapiens
  source 1..30: mol_type = unassigned RNA
tatgtaattctaatccagctataaaatatt

SEQ ID NO: 4344 - RNA, 30 nt, Homo sapiens
  source 1..30: mol_type = unassigned RNA
cattttatgtaattctaatccagctataaa

SEQ ID NO: 4345 - RNA, 30 nt, Homo sapiens
  source 1..30: mol_type = unassigned RNA
gggatattaacttgtaatatacaggtatcc

SEQ ID NO: 4346 - RNA, 30 nt, Homo sapiens
  source 1..30: mol_type = unassigned RNA
acttgtaatatacaggtatccctcctggta

SEQ ID NO: 4347 - RNA, 30 nt, Homo sapiens
  source 1..30: mol_type = unassigned RNA
taatatacaggtatccctcctggtaagctc

SEQ ID NO: 4348 - RNA, 30 nt, Homo sapiens
  source 1..30: mol_type = unassigned RNA
tgtcttaacatttttaaatctatggtaatc

SEQ ID NO: 4349 - RNA, 30 nt, Homo sapiens
  source 1..30: mol_type = unassigned RNA
gctctctgtgtgagcatgtgtgcgtgtgtg

SEQ ID NO: 4350 - RNA, 30 nt, Homo sapiens
  source 1..30: mol_type = unassigned RNA
ggctctctgtgtgagcatgtgtgcgtgtgt

SEQ ID NO: 4351 - RNA, 30 nt, Homo sapiens
  source 1..30: mol_type = unassigned RNA
caggactcggcagaagaccttcgagagaaa

SEQ ID NO: 4352 - RNA, 30 nt, Homo sapiens
  source 1..30: mol_type = unassigned RNA
atattgcaggactcggcagaagaccttcga

SEQ ID NO: 4353 - RNA, 30 nt, Homo sapiens
  source 1..30: mol_type = unassigned RNA
tattcatattgcaggactcggcagaagacc

SEQ ID NO: 4354 - RNA, 30 nt, Homo sapiens
  source 1..30: mol_type = unassigned RNA
aaattatattcatattgcaggactcggcag

SEQ ID NO: 4355 - RNA, 30 nt, Homo sapiens
  source 1..30: mol_type = unassigned RNA
aaaattatattcatattgcaggactcggca

SEQ ID NO: 4356 - RNA, 30 nt, Homo sapiens
  source 1..30: mol_type = unassigned RNA
taaaattatattcatattgcaggactcggc

SEQ ID NO: 4357 - RNA, 30 nt, Homo sapiens
  source 1..30: mol_type = unassigned RNA
ttaaaattatattcatattgcaggactcgg

SEQ ID NO: 4358 - RNA, 30 nt, Homo sapiens
  source 1..30: mol_type = unassigned RNA
gatttttaaaattatattcatattgcagga

SEQ ID NO: 4359 - RNA, 30 nt, Homo sapiens
  source 1..30: mol_type = unassigned RNA
attggatttttaaaattatattcatattgc

SEQ ID NO: 4360 - RNA, 30 nt, Homo sapiens
  source 1..30: mol_type = unassigned RNA
tgccccatcactctctcttaattggatttt

SEQ ID NO: 4361 - RNA, 30 nt, Homo sapiens
  source 1..30: mol_type = unassigned RNA
tgtgttctgccccatcactctctcttaatt

SEQ ID NO: 4362 - RNA, 30 nt, Homo sapiens
  source 1..30: mol_type = unassigned RNA
acaaggatgataaatcaataatgcaagctt

SEQ ID NO: 4363 - RNA, 30 nt, Homo sapiens
  source 1..30: mol_type = unassigned RNA
ctctgggaattatgtgttctgccccatcac

SEQ ID NO: 4364 - RNA, 30 nt, Homo sapiens
  source 1..30: mol_type = unassigned RNA
attactctgggaattatgtgttctgcccca

SEQ ID NO: 4365 - RNA, 30 nt, Homo sapiens
  source 1..30: mol_type = unassigned RNA
tattactctgggaattatgtgttctgcccc

SEQ ID NO: 4366 - RNA, 30 nt, Homo sapiens
  source 1..30: mol_type = unassigned RNA
cgaactcatatacctggggattttattact

SEQ ID NO: 4367 - RNA, 30 nt, Homo sapiens
  source 1..30: mol_type = unassigned RNA
cttccgaactcatatacctggggattttat

SEQ ID NO: 4368 - RNA, 30 nt, Homo sapiens
  source 1..30: mol_type = unassigned RNA
acttccgaactcatatacctggggatttta

SEQ ID NO: 4369 - RNA, 30 nt, Homo sapiens
  source 1..30: mol_type = unassigned RNA
tacttccgaactcatatacctggggatttt

SEQ ID NO: 4370 - RNA, 30 nt, Homo sapiens
  source 1..30: mol_type = unassigned RNA
caaaatattttacttccgaactcatatacc

SEQ ID NO: 4371 - RNA, 30 nt, Homo sapiens
  source 1..30: mol_type = unassigned RNA
acaaaatattttacttccgaactcatatac

SEQ ID NO: 4372 - RNA, 30 nt, Homo sapiens
  source 1..30: mol_type = unassigned RNA
aatctatggtaatctttacaaaatatttta

SEQ ID NO: 4373 - RNA, 30 nt, Homo sapiens
  source 1..30: mol_type = unassigned RNA
aaatctatggtaatctttacaaaatatttt

SEQ ID NO: 4374 - RNA, 30 nt, Homo sapiens
  source 1..30: mol_type = unassigned RNA
taaatctatggtaatctttacaaaatattt

SEQ ID NO: 4375 - RNA, 30 nt, Homo sapiens
  source 1..30: mol_type = unassigned RNA
ttaaatctatggtaatctttacaaaatatt

SEQ ID NO: 4376 - RNA, 30 nt, Homo sapiens
  source 1..30: mol_type = unassigned RNA
acatttttaaatctatggtaatctttacaa

SEQ ID NO: 4377 - RNA, 30 nt, Homo sapiens
  source 1..30: mol_type = unassigned RNA
ttactctgggaattatgtgttctgccccat

SEQ ID NO: 4378 - RNA, 30 nt, Homo sapiens
  source 1..30: mol_type = unassigned RNA
ttgtacattgaaggaaaggaagacacactt

SEQ ID NO: 4379 - RNA, 30 nt, Homo sapiens
  source 1..30: mol_type = unassigned RNA
gagagaaaggtagaaaataagaatttggct

SEQ ID NO: 4380 - RNA, 30 nt, Homo sapiens
  source 1..30: mol_type = unassigned RNA
aaggaaaggaagacacacttaagacagcat

SEQ ID NO: 4381 - RNA, 30 nt, Homo sapiens
  source 1..30: mol_type = unassigned RNA
atctcctcagtcccatcatggttagcacat

SEQ ID NO: 4382 - RNA, 30 nt, Homo sapiens
  source 1..30: mol_type = unassigned RNA
acttaatctcctcagtcccatcatggttag

SEQ ID NO: 4383 - RNA, 30 nt, Homo sapiens
  source 1..30: mol_type = unassigned RNA
cagaaataacattgacttaatctcctcagt

SEQ ID NO: 4384 - RNA, 30 nt, Homo sapiens
  source 1..30: mol_type = unassigned RNA
tggtgggaacacactctgatgaccagttcc

SEQ ID NO: 4385 - RNA, 30 nt, Homo sapiens
  source 1..30: mol_type = unassigned RNA
ctggtgggaacacactctgatgaccagttc

SEQ ID NO: 4386 - RNA, 30 nt, Homo sapiens
  source 1..30: mol_type = unassigned RNA
tgcaggctcagcacagcatcgatttctggt

SEQ ID NO: 4387 - RNA, 30 nt, Homo sapiens
  source 1..30: mol_type = unassigned RNA
taacgtatgagacacatggcgttctgcagg

SEQ ID NO: 4388 - RNA, 30 nt, Homo sapiens
  source 1..30: mol_type = unassigned RNA
ggagaaagagagctatgaggccgtgtgggt

SEQ ID NO: 4389 - RNA, 30 nt, Homo sapiens
  source 1..30: mol_type = unassigned RNA
gggagaaagagagctatgaggccgtgtggg

SEQ ID NO: 4390 - RNA, 30 nt, Homo sapiens
  source 1..30: mol_type = unassigned RNA
ggctttgggagaaagagagctatgaggccg

SEQ ID NO: 4391 - RNA, 30 nt, Homo sapiens
  source 1..30: mol_type = unassigned RNA
aggctttgggagaaagagagctatgaggcc

SEQ ID NO: 4392 - RNA, 30 nt, Homo sapiens
  source 1..30: mol_type = unassigned RNA
ccatgatttaggctttgggagaaagagagc

SEQ ID NO: 4393 - RNA, 30 nt, Homo sapiens
  source 1..30: mol_type = unassigned RNA
aaataattgccatgatttaggctttgggag

SEQ ID NO: 4394 - RNA, 30 nt, Homo sapiens
  source 1..30: mol_type = unassigned RNA
ttcaaataattgccatgatttaggctttgg

SEQ ID NO: 4395 - RNA, 30 nt, Homo sapiens
  source 1..30: mol_type = unassigned RNA
cctggggcttattcaaataattgccatgat

SEQ ID NO: 4396 - RNA, 30 nt, Homo sapiens
  source 1..30: mol_type = unassigned RNA
atagcttacctggggcttattcaaataatt

SEQ ID NO: 4397 - RNA, 30 nt, Homo sapiens
  source 1..30: mol_type = unassigned RNA
aatagcttacctggggcttattcaaataat

SEQ ID NO: 4398 - RNA, 30 nt, Homo sapiens
  source 1..30: mol_type = unassigned RNA
taatagcttacctggggcttattcaaataa

SEQ ID NO: 4399 - RNA, 30 nt, Homo sapiens
  source 1..30: mol_type = unassigned RNA
atgcctagttttaatagcttacctggggct

SEQ ID NO: 4400 - RNA, 30 nt, Homo sapiens
  source 1..30: mol_type = unassigned RNA
caaattgatgcctagttttaatagcttacc

SEQ ID NO: 4401 - RNA, 30 nt, Homo sapiens
  source 1..30: mol_type = unassigned RNA
aagagaaaatacttccaaattgatgcctag

SEQ ID NO: 4402 - RNA, 30 nt, Homo sapiens
  source 1..30: mol_type = unassigned RNA
tgatcacagactcaccttgaagagaaaata

SEQ ID NO: 4403 - RNA, 30 nt, Homo sapiens
  source 1..30: mol_type = unassigned RNA
ctgatcacagactcaccttgaagagaaaat

SEQ ID NO: 4404 - RNA, 30 nt, Homo sapiens
  source 1..30: mol_type = unassigned RNA
tcctttctgatcacagactcaccttgaaga

SEQ ID NO: 4405 - RNA, 30 nt, Homo sapiens
  source 1..30: mol_type = unassigned RNA
aacagaccagagatggtcttctcctttctg

SEQ ID NO: 4406 - RNA, 30 nt, Homo sapiens
  source 1..30: mol_type = unassigned RNA
aaacagaccagagatggtcttctcctttct

SEQ ID NO: 4407 - RNA, 30 nt, Homo sapiens
  source 1..30: mol_type = unassigned RNA
tttaaacagaccagagatggtcttctcctt

SEQ ID NO: 4408 - RNA, 30 nt, Homo sapiens
  source 1..30: mol_type = unassigned RNA
gcacatttcaaaatgcctccttaactactt

SEQ ID NO: 4409 - RNA, 30 nt, Homo sapiens
  source 1..30: mol_type = unassigned RNA
taattatcttttaataaaggaatcaggccc

SEQ ID NO: 4410 - RNA, 30 nt, Homo sapiens
  source 1..30: mol_type = unassigned RNA
aaaatgcctccttaactacttccataggcc

SEQ ID NO: 4411 - RNA, 30 nt, Homo sapiens
  source 1..30: mol_type = unassigned RNA
actacttccataggccagagatatttagtt

SEQ ID NO: 4412 - RNA, 30 nt, Homo sapiens
  source 1..30: mol_type = unassigned RNA
ttaattatcttttaataaaggaatcaggcc

SEQ ID NO: 4413 - RNA, 30 nt, Homo sapiens
  source 1..30: mol_type = unassigned RNA
tgaaacatttttaattatcttttaataaag

SEQ ID NO: 4414 - RNA, 30 nt, Homo sapiens
  source 1..30: mol_type = unassigned RNA
tacattgaaggaaaggaagacacacttaag

SEQ ID NO: 4415 - RNA, 30 nt, Homo sapiens
  source 1..30: mol_type = unassigned RNA
aatcccttgtgaaacatttttaattatctt

SEQ ID NO: 4416 - RNA, 30 nt, Homo sapiens
  source 1..30: mol_type = unassigned RNA
gaatcccttgtgaaacatttttaattatct

SEQ ID NO: 4417 - RNA, 30 nt, Homo sapiens
  source 1..30: mol_type = unassigned RNA
tgaatcccttgtgaaacatttttaattatc

SEQ ID NO: 4418 - RNA, 30 nt, Homo sapiens
  source 1..30: mol_type = unassigned RNA
ccatcaaagcaggcaggcaggcaggagaga

SEQ ID NO: 4419 - RNA, 30 nt, Homo sapiens
  source 1..30: mol_type = unassigned RNA
atattaccatcaaagcaggcaggcaggcag

SEQ ID NO: 4420 - RNA, 30 nt, Homo sapiens
  source 1..30: mol_type = unassigned RNA
tcttcatattaccatcaaagcaggcaggca

SEQ ID NO: 4421 - RNA, 30 nt, Homo sapiens
  source 1..30: mol_type = unassigned RNA
aagattctcttcatattaccatcaaagcag

SEQ ID NO: 4422 - RNA, 30 nt, Homo sapiens
  source 1..30: mol_type = unassigned RNA
caagattctcttcatattaccatcaaagca

SEQ ID NO: 4423 - RNA, 30 nt, Homo sapiens
  source 1..30: mol_type = unassigned RNA
tttcaagattctcttcatattaccatcaaa

SEQ ID NO: 4424 - RNA, 30 nt, Homo sapiens
  source 1..30: mol_type = unassigned RNA
gatgttatttcaagattctcttcatattac

SEQ ID NO: 4425 - RNA, 30 nt, Homo sapiens
  source 1..30: mol_type = unassigned RNA
atttaaacagaccagagatggtcttctcct

SEQ ID NO: 4426 - RNA, 30 nt, Homo sapiens
  source 1..30: mol_type = unassigned RNA
atataactattagatgttatttcaagattc

SEQ ID NO: 4427 - RNA, 30 nt, Homo sapiens
  source 1..30: mol_type = unassigned RNA
acatttaatataactattagatgttatttc

SEQ ID NO: 4428 - RNA, 30 nt, Homo sapiens
  source 1..30: mol_type = unassigned RNA
cacattcacatttaatataactattagatg

SEQ ID NO: 4429 - RNA, 30 nt, Homo sapiens
  source 1..30: mol_type = unassigned RNA
acacattcacatttaatataactattagat

SEQ ID NO: 4430 - RNA, 30 nt, Homo sapiens
  source 1..30: mol_type = unassigned RNA
aataaaataaatttacacattcacatttaa

SEQ ID NO: 4431 - RNA, 30 nt, Homo sapiens
  source 1..30: mol_type = unassigned RNA
ttgaataaaataaatttacacattcacatt

SEQ ID NO: 4432 - RNA, 30 nt, Homo sapiens
  source 1..30: mol_type = unassigned RNA
gttgaataaaataaatttacacattcacat

SEQ ID NO: 4433 - RNA, 30 nt, Homo sapiens
  source 1..30: mol_type = unassigned RNA
tgttgaataaaataaatttacacattcaca

SEQ ID NO: 4434 - RNA, 30 nt, Homo sapiens
  source 1..30: mol_type = unassigned RNA
acattttgttgaataaaataaatttacaca

SEQ ID NO: 4435 - RNA, 30 nt, Homo sapiens
  source 1..30: mol_type = unassigned RNA
aacattttgttgaataaaataaatttacac

SEQ ID NO: 4436 - RNA, 30 nt, Homo sapiens
  source 1..30: mol_type = unassigned RNA
taacattttgttgaataaaataaatttaca

SEQ ID NO: 4437 - RNA, 30 nt, Homo sapiens
  source 1..30: mol_type = unassigned RNA
gttttaacattttgttgaataaaataaatt

SEQ ID NO: 4438 - RNA, 30 nt, Homo sapiens
  source 1..30: mol_type = unassigned RNA
agttttaacattttgttgaataaaataaat

SEQ ID NO: 4439 - RNA, 30 nt, Homo sapiens
  source 1..30: mol_type = unassigned RNA
cataggccagagatatttagttttaacatt

SEQ ID NO: 4440 - RNA, 30 nt, Homo sapiens
  source 1..30: mol_type = unassigned RNA
aatataactattagatgttatttcaagatt

SEQ ID NO: 4441 - RNA, 30 nt, Homo sapiens
  source 1..30: mol_type = unassigned RNA
tatttaaacagaccagagatggtcttctcc

SEQ ID NO: 4442 - RNA, 30 nt, Homo sapiens
  source 1..30: mol_type = unassigned RNA
caaaatgcctccttaactacttccataggc

SEQ ID NO: 4443 - RNA, 30 nt, Homo sapiens
  source 1..30: mol_type = unassigned RNA
gaggtgagctcccattgcagaggtcacacc

SEQ ID NO: 4444 - RNA, 30 nt, Homo sapiens
  source 1..30: mol_type = unassigned RNA
tggtgtattcataaattccagattctctat

SEQ ID NO: 4445 - RNA, 30 nt, Homo sapiens
  source 1..30: mol_type = unassigned RNA
ctggtgtattcataaattccagattctcta

SEQ ID NO: 4446 - RNA, 30 nt, Homo sapiens
  source 1..30: mol_type = unassigned RNA
tctggtgtattcataaattccagattctct

SEQ ID NO: 4447 - RNA, 30 nt, Homo sapiens
  source 1..30: mol_type = unassigned RNA
ttctggtgtattcataaattccagattctc

SEQ ID NO: 4448 - RNA, 30 nt, Homo sapiens
  source 1..30: mol_type = unassigned RNA
aactgtttttctggtgtattcataaattcc

SEQ ID NO: 4449 - RNA, 30 nt, Homo sapiens
  source 1..30: mol_type = unassigned RNA
caactgtttttctggtgtattcataaattc

SEQ ID NO: 4450 - RNA, 30 nt, Homo sapiens
  source 1..30: mol_type = unassigned RNA
tttcaactgtttttctggtgtattcataaa

SEQ ID NO: 4451 - RNA, 30 nt, Homo sapiens
  source 1..30: mol_type = unassigned RNA
ctttcaactgtttttctggtgtattcataa

SEQ ID NO: 4452 - RNA, 30 nt, Homo sapiens
  source 1..30: mol_type = unassigned RNA
ccgcaatggtgctttctttcaactgttttt

SEQ ID NO: 4453 - RNA, 30 nt, Homo sapiens
  source 1..30: mol_type = unassigned RNA
cccgcaatggtgctttctttcaactgtttt

SEQ ID NO: 4454 - RNA, 30 nt, Homo sapiens
  source 1..30: mol_type = unassigned RNA
tcccgcaatggtgctttctttcaactgttt

SEQ ID NO: 4455 - RNA, 30 nt, Homo sapiens
  source 1..30: mol_type = unassigned RNA
ctcaaacattttcccgcaatggtgctttct

SEQ ID NO: 4456 - RNA, 30 nt, Homo sapiens
  source 1..30: mol_type = unassigned RNA
tttactcaaacattttcccgcaatggtgct

SEQ ID NO: 4457 - RNA, 30 nt, Homo sapiens
  source 1..30: mol_type = unassigned RNA
ataaattccagattctctatgggaagtaac

SEQ ID NO: 4458 - RNA, 30 nt, Homo sapiens
  source 1..30: mol_type = unassigned RNA
ctttactcaaacattttcccgcaatggtgc

SEQ ID NO: 4459 - RNA, 30 nt, Homo sapiens
  source 1..30: mol_type = unassigned RNA
agggcctcgagccaataagtcttcctattt

SEQ ID NO: 4460 - RNA, 30 nt, Homo sapiens
  source 1..30: mol_type = unassigned RNA
gagatgacaaaaatctaaacttgagggcct

SEQ ID NO: 4461 - RNA, 30 nt, Homo sapiens
  source 1..30: mol_type = unassigned RNA
ggagatgacaaaaatctaaacttgagggcc

SEQ ID NO: 4462 - RNA, 30 nt, Homo sapiens
  source 1..30: mol_type = unassigned RNA
tggcagtcgggcagggctctctgtataacc

SEQ ID NO: 4463 - RNA, 30 nt, Homo sapiens
  source 1..30: mol_type = unassigned RNA
attctggcagtcgggcagggctctctgtat

SEQ ID NO: 4464 - RNA, 30 nt, Homo sapiens
  source 1..30: mol_type = unassigned RNA
aattctggcagtcgggcagggctctctgta

SEQ ID NO: 4465 - RNA, 30 nt, Homo sapiens
  source 1..30: mol_type = unassigned RNA
aatgtttaattctggcagtcgggcagggct

SEQ ID NO: 4466 - RNA, 30 nt, Homo sapiens
  source 1..30: mol_type = unassigned RNA
aaatgtttaattctggcagtcgggcagggc

SEQ ID NO: 4467 - RNA, 30 nt, Homo sapiens
  source 1..30: mol_type = unassigned RNA
taaatgtttaattctggcagtcgggcaggg

SEQ ID NO: 4468 - RNA, 30 nt, Homo sapiens
  source 1..30: mol_type = unassigned RNA
cagaggtcacacctgtgatatcaccatttt

SEQ ID NO: 4469 - RNA, 30 nt, Homo sapiens
  source 1..30: mol_type = unassigned RNA
atgttttaaatgtttaattctggcagtcgg

SEQ ID NO: 4470 - RNA, 30 nt, Homo sapiens
  source 1..30: mol_type = unassigned RNA
caaaagtaattcatgttttaaatgtttaat

SEQ ID NO: 4471 - RNA, 30 nt, Homo sapiens
  source 1..30: mol_type = unassigned RNA
agacagcattacaaaagtaattcatgtttt

SEQ ID NO: 4472 - RNA, 30 nt, Homo sapiens
  source 1..30: mol_type = unassigned RNA
ctatttctttactcaaacattttcccgcaa

SEQ ID NO: 4473 - RNA, 30 nt, Homo sapiens
  source 1..30: mol_type = unassigned RNA
cagattctctatgggaagtaacttttattg

SEQ ID NO: 4474 - RNA, 30 nt, Homo sapiens
  source 1..30: mol_type = unassigned RNA
actcaaacattttcccgcaatggtgctttc

SEQ ID NO: 4475 - RNA, 30 nt, Homo sapiens
  source 1..30: mol_type = unassigned RNA
ctcaaggtcacacagttagtcagatccaga

SEQ ID NO: 4476 - RNA, 30 nt, Homo sapiens
  source 1..30: mol_type = unassigned RNA
tctatgggaagtaacttttattgattgatt

SEQ ID NO: 4477 - RNA, 30 nt, Homo sapiens
  source 1..30: mol_type = unassigned RNA
accgattgctgctagtctcatatctgttcc

SEQ ID NO: 4478 - RNA, 30 nt, Homo sapiens
  source 1..30: mol_type = unassigned RNA
caccgattgctgctagtctcatatctgttc

SEQ ID NO: 4479 - RNA, 30 nt, Homo sapiens
  source 1..30: mol_type = unassigned RNA
ggaatccatctttcaccgattgctgctagt

SEQ ID NO: 4480 - RNA, 30 nt, Homo sapiens
  source 1..30: mol_type = unassigned RNA
ggcccaggccatctggcttcggaatccatc

SEQ ID NO: 4481 - RNA, 30 nt, Homo sapiens
  source 1..30: mol_type = unassigned RNA
gggcccaggccatctggcttcggaatccat

SEQ ID NO: 4482 - RNA, 30 nt, Homo sapiens
  source 1..30: mol_type = unassigned RNA
gtcagatccagaatttgggcccaggccatc

SEQ ID NO: 4483 - RNA, 30 nt, Homo sapiens
  source 1..30: mol_type = unassigned RNA
aagtatcttactcaaggtcacacagttagt

SEQ ID NO: 4484 - RNA, 30 nt, Homo sapiens
  source 1..30: mol_type = unassigned RNA
cagatatggaaactgaggcacagaaagttg

SEQ ID NO: 4485 - RNA, 30 nt, Homo sapiens
  source 1..30: mol_type = unassigned RNA
tattacagatatggaaactgaggcacagaa

SEQ ID NO: 4486 - RNA, 30 nt, Homo sapiens
  source 1..30: mol_type = unassigned RNA
ctgctagtctcatatctgttccatgttaga

SEQ ID NO: 4487 - RNA, 30 nt, Homo sapiens
  source 1..30: mol_type = unassigned RNA
atcacttaataatcctaagtaggttctatt

SEQ ID NO: 4488 - RNA, 30 nt, Homo sapiens
  source 1..30: mol_type = unassigned RNA
catgttagaggtgagctcccattgcagagg

SEQ ID NO: 4489 - RNA, 30 nt, Homo sapiens
  source 1..30: mol_type = unassigned RNA
ataatcctaagtaggttctattacagatat

SEQ ID NO: 4490 - RNA, 30 nt, Homo sapiens
  source 1..30: mol_type = unassigned RNA
cacatattaactgtgttaatcacttaataa

SEQ ID NO: 4491 - RNA, 30 nt, Homo sapiens
  source 1..30: mol_type = unassigned RNA
tattgattgatttaacccttgtatagcaca

SEQ ID NO: 4492 - RNA, 30 nt, Homo sapiens
  source 1..30: mol_type = unassigned RNA
attgattgatttaacccttgtatagcacat

SEQ ID NO: 4493 - RNA, 30 nt, Homo sapiens
  source 1..30: mol_type = unassigned RNA
ttgattgatttaacccttgtatagcacata

SEQ ID NO: 4494 - RNA, 30 nt, Homo sapiens
  source 1..30: mol_type = unassigned RNA
attgatttaacccttgtatagcacatataa

SEQ ID NO: 4495 - RNA, 30 nt, Homo sapiens
  source 1..30: mol_type = unassigned RNA
atttaacccttgtatagcacatataacatg

SEQ ID NO: 4496 - RNA, 30 nt, Homo sapiens
  source 1..30: mol_type = unassigned RNA
actgtgttaatcacttaataatcctaagta

SEQ ID NO: 4497 - RNA, 30 nt, Homo sapiens
  source 1..30: mol_type = unassigned RNA
aacccttgtatagcacatataacatgcaag

SEQ ID NO: 4498 - RNA, 30 nt, Homo sapiens
  source 1..30: mol_type = unassigned RNA
tatagcacatataacatgcaaggcattgtt

SEQ ID NO: 4499 - RNA, 30 nt, Homo sapiens
  source 1..30: mol_type = unassigned RNA
ttctaagaactttccacatattaactgtgt

SEQ ID NO: 4500 - RNA, 30 nt, Homo sapiens
  source 1..30: mol_type = unassigned RNA
taagaactttccacatattaactgtgttaa

SEQ ID NO: 4501 - RNA, 30 nt, Homo sapiens
  source 1..30: mol_type = unassigned RNA
ccacatattaactgtgttaatcacttaata

SEQ ID NO: 4502 - RNA, 30 nt, Homo sapiens
  source 1..30: mol_type = unassigned RNA
acccttgtatagcacatataacatgcaagg

SEQ ID NO: 4503 - protein, 1093 aa, unidentified
MSNKEKNASETRKAYTTKMIPRSHDRMKLLGNFMDYLMDGTPIFFELWNQFGGGIDRDIISGTANKDKISDDLLLAVNWFKVMPINSKPQGVSPSNLANLFQQYSGSEPDIQAQEYFASNFDTEKHQWKDMRVEYERLLAELQLSRSDMHHDLKLMYKEKCIGLSLSTAHYITSVMFGTGAKNNRQTKHQFYSKVIQLLEESTQINSVEQLASIILKAGDCDSYRKLRIRCSRKGATPSILKIVQDYELGTNHDDEVNVPSLIANLKEKLGRFEYECEWKCMEKIKAFLASKVGPYYLGSYSAMLENALSPIKGMTTKNCKFVLKQIDAKNDIKYENEPFGKIVEGFFDSPYFESDTNVKWVLHPHHIGESNIKTLWEDLNAIHSKYEEDIASLSEDKKEKRIKVYQGDVCQTINTYCEEVGKEAKTPLVQLLRYLYSRKDDIAVDKIIDGITFLSKKHKVEKQKINPVIQKYPSFNFGNNSKLLGKIISPKDKLKHNLKCNRNQVDNYIWIEIKVLNTKTMRWEKHHYALSSTRFLEEVYYPATSENPPDALAARFRTKTNGYEGKPALSAEQIEQIRSAPVGLRKVKKRQMRLEAARQQNLLPRYTWGKDFNINICKRGNNFEVTLATKVKKKKEKNYKVVLGYDANIVRKNTYAAIEAHANGDGVIDYNDLPVKPIESGFVTVESQVRDKSYDQLSYNGVKLLYCKPHVESRRSFLEKYRNGTMKDNRGNNIQIDFMKDFEAIADDETSLYYFNMKYCKLLQSSIRNHSSQAKEYREEIFELLRDGKLSVLKLSSLSNLSFVMFKVAKSLIGTYFGHLLKKPKNSKSDVKAPPITDEDKQKADPEMFALRLALEEKRLNKVKSKKEVIANKIVAKALELRDKYGPVLIKGENISDTTKKGKKSSTNSFLMDWLARGVANKVKEMVMMHQGLEFVEVNPNFTSHQDPFVHKNPENTFRARYSRCTPSELTEKNRKEILSFLSDKPSKRPTNAYYNEGAMAFLATYGLKKNDVLGVSLEKFKQIMANILHQRSEDQLLFPSRGGMFYLATYKLDADATSVNWNGKQFWVCNADLVAAYNVGLVDIQKDFKKK

SEQ ID NO: 4504 - protein, 1098 aa, unidentified
MSISNNNILPYNPKLLPDDRKHKMLVDTFNQLDLIRNNLHDMIIALYGALKYDNIKQFASKEKPHISADALCSINWFRLVKTNERKPAIESNQIISKFIQYSGHTPDKYALSHITGNHEPSHKWIDCREYAINYARIMHLSFSQFQDLATACLNCKILILNGTLTSSWAWGANSALFGGSDKENFSVKAKILNSFIENLKDEMNTTKFQVVEKVCQQIGSSDAADLFDLYRSTVKDGNRGPATGRNPKVMNLFSQDGEISSEQREDFIESFQKVMQEKNSKQIIPHLDKLKYHLVKQSGLYDIYSWAAAIKNANSTIVASNSSNLNTILNKTEKQQTFEELRKDEKIVACSKILLSVNDTLPEDLHYNPSTSNLGKNLDVFFDLLNENSVHTIENKEEKNKIVKECVNQYMEECKGLNKPPMPVLLTFISDYAHKHQAQDFLSAAKMNFIDLKIKSIKVVPTVHGSSPYTWISNLSKKNKDGKMIRTPNSSLIGWIIPPEEIHDQKFAGQNPIIWAVLRVYCNNKWEMHHFPFSDSRFFTEVYAYKPNLPYLPGGENRSKRFGYRHSTNLSNESRQILLDKSKYAKANKSVLRCMENMTHNVVFDPKTSLNIRIKTDKNNSPVLDDKGRITFVMQINHRILEKYNNTKIEIGDRILAYDQNQSENHTYAILQRTEEGSHAHQFNGWYVRVLETGKVTSIVQGLSGPIDQLNYDGMPVTSHKFNCWQADRSAFVSQFASLKISETETFDEAYQAINAQGAYTWNLFYLRILRKALRVCHMENINQFREEILAISKNRLSPMSLGSLSQNSLKMIRAFKSIINCYMSRMSFVDELQKKEGDLELHTIMRLTDNKLNDKRVEKINRASSFLTNKAHSMGCKMIVGESDLPVADSKTSKKQNVDRMDWCARALSHKVEYACKLMGLAYRGIPAYMSSHQDPLVHLVESKRSVLRPRFVVADKSDVKQHHLDNLRRMLNSKTKVGTAVYYREAVELMCEELGIHKTDMAKGKVSLSDFVDKFIGEKAIFPQRGGRFYMSTKRLTTGAKLICYSGSDVWLSDADEIAAINIGMFVVCDQTGAFKKKKKEKLDDEECDILPFRPM

SEQ ID NO: 4505 - RNA, 43 nt, synthetic construct
  source 1..43: mol_type = other RNA
agaaatccgtctttcattgacggtgccccatcactctctctta

SEQ ID NO: 4506 - RNA, 43 nt, synthetic construct
  source 1..43: mol_type = other RNA
agaaatccgtctttcattgacggattggatttttaaaattata

SEQ ID NO: 4507 - RNA, 43 nt, synthetic construct
  source 1..43: mol_type = other RNA
agaaatccgtctttcattgacgggatttttaaaattatattca

SEQ ID NO: 4508 - RNA, 43 nt, synthetic construct
  source 1..43: mol_type = other RNA
agaaatccgtctttcattgacggttaaaattatattcatattg

SEQ ID NO: 4509 - RNA, 43 nt, synthetic construct
  source 1..43: mol_type = other RNA
agaaatccgtctttcattgacggtaaaattatattcatattgc

SEQ ID NO: 4510 - RNA, 43 nt, synthetic construct
  source 1..43: mol_type = other RNA
agaaatccgtctttcattgacggaaaattatattcatattgca

SEQ ID NO: 4511 - RNA, 43 nt, synthetic construct
  source 1..43: mol_type = other RNA
agaaatccgtctttcattgacggaaattatattcatattgcag

SEQ ID NO: 4512 - RNA, 43 nt, synthetic construct
  source 1..43: mol_type = other RNA
agaaatccgtctttcattgacggtattcatattgcaggactcg

SEQ ID NO: 4513 - RNA, 43 nt, synthetic construct
  source 1..43: mol_type = other RNA
agaaatccgtctttcattgacggatattgcaggactcggcaga

SEQ ID NO: 4514 - RNA, 43 nt, synthetic construct
  source 1..43: mol_type = other RNA
agaaatccgtctttcattgacggcaggactcggcagaagacct

SEQ ID NO: 4515 - RNA, 43 nt, synthetic construct
  source 1..43: mol_type = other RNA
agaaatccgtctttcattgacgggagagaaaggtagaaaataa

SEQ ID NO: 4516 - RNA, 43 nt, synthetic construct
  source 1..43: mol_type = other RNA
agaaatccgtctttcattgacggggctctctgtgtgagcatgt

SEQ ID NO: 4517 - RNA, 43 nt, synthetic construct
  source 1..43: mol_type = other RNA
agaaatccgtctttcattgacgggctctctgtgtgagcatgtg

SEQ ID NO: 4518 - RNA, 43 nt, synthetic construct
  source 1..43: mol_type = other RNA
agaaatccgtctttcattgacggtggcacagttgacaaggatg

SEQ ID NO: 4519 - RNA, 43 nt, synthetic construct
  source 1..43: mol_type = other RNA
agaaatccgtctttcattgacggacaaggatgataaatcaata

SEQ ID NO: 4520 - RNA, 43 nt, synthetic construct
  source 1..43: mol_type = other RNA
agaaatccgtctttcattgacggctatcatttatgaatagcaa

SEQ ID NO: 4521 - RNA, 43 nt, synthetic construct
  source 1..43: mol_type = other RNA
agaaatccgtctttcattgacggatgaatagcaatactgaaga

SEQ ID NO: 4522 - RNA, 43 nt, synthetic construct
  source 1..43: mol_type = other RNA
agaaatccgtctttcattgacggtgaatagcaatactgaagaa

SEQ ID NO: 4523 - RNA, 43 nt, synthetic construct
  source 1..43: mol_type = other RNA
agaaatccgtctttcattgacggaaacaaaagattgctgtctc

SEQ ID NO: 4524 - RNA, 43 nt, synthetic construct
  source 1..43: mol_type = other RNA
agaaatccgtctttcattgacggctgtctcaatatatcttata

SEQ ID NO: 4525 - RNA, 43 nt, synthetic construct
  source 1..43: mol_type = other RNA
agaaatccgtctttcattgacggtatttattatttaccaaatt

SEQ ID NO: 4526 - RNA, 43 nt, synthetic construct
  source 1..43: mol_type = other RNA
agaaatccgtctttcattgacggaggaagaaatactcttagaa

SEQ ID NO: 4527 - RNA, 43 nt, synthetic construct
  source 1..43: mol_type = other RNA
agaaatccgtctttcattgacgggaataatttggtaaataata

SEQ ID NO: 4528 - RNA, 43 nt, synthetic construct
  source 1..43: mol_type = other RNA
agaaatccgtctttcattgacggggtaaataataaatataaga

SEQ ID NO: 4529 - RNA, 43 nt, synthetic construct
  source 1..43: mol_type = other RNA
agaaatccgtctttcattgacgggtaaataataaatataagat

SEQ ID NO: 4530 - RNA, 43 nt, synthetic construct
  source 1..43: mol_type = other RNA
agaaatccgtctttcattgacggagacagcaatcttttgtttt

SEQ ID NO: 4531 - RNA, 43 nt, synthetic construct
  source 1..43: mol_type = other RNA
agaaatccgtctttcattgacggtgttttaatttcttcagtat

SEQ ID NO: 4532 - RNA, 43 nt, synthetic construct
  source 1..43: mol_type = other RNA
agaaatccgtctttcattgacgggttttaatttcttcagtatt

SEQ ID NO: 4533 - RNA, 43 nt, synthetic construct
  source 1..43: mol_type = other RNA
agaaatccgtctttcattgacggttttaatttcttcagtattg

SEQ ID NO: 4534 - RNA, 43 nt, synthetic construct
  source 1..43: mol_type = other RNA
agaaatccgtctttcattgacggtaatttcttcagtattgcta

SEQ ID NO: 4535 - RNA, 43 nt, synthetic construct
  source 1..43: mol_type = other RNA
agaaatccgtctttcattgacggaatttcttcagtattgctat

SEQ ID NO: 4536 - RNA, 43 nt, synthetic construct
  source 1..43: mol_type = other RNA
agaaatccgtctttcattgacggatttcttcagtattgctatt

SEQ ID NO: 4537 - RNA, 43 nt, synthetic construct
  source 1..43: mol_type = other RNA
agaaatccgtctttcattgacggcttcagtattgctattcata

SEQ ID NO: 4538 - RNA, 43 nt, synthetic construct
  source 1..43: mol_type = other RNA
agaaatccgtctttcattgacggttcagtattgctattcataa

SEQ ID NO: 4539 - RNA, 43 nt, synthetic construct
  source 1..43: mol_type = other RNA
agaaatccgtctttcattgacggagtattgctattcataaatg

SEQ ID NO: 4540 - RNA, 43 nt, synthetic construct
  source 1..43: mol_type = other RNA
agaaatccgtctttcattgacggctattcataaatgatagtaa

SEQ ID NO: 4541 - RNA, 43 nt, synthetic construct
  source 1..43: mol_type = other RNA
agaaatccgtctttcattgacggataaatgatagtaagcttgc

SEQ ID NO: 4542 - RNA, 43 nt, synthetic construct
  source 1..43: mol_type = other RNA
agaaatccgtctttcattgacggcattattgatttatcatcct

SEQ ID NO: 4543 - RNA, 43 nt, synthetic construct
  source 1..43: mol_type = other RNA
agaaatccgtctttcattgacggttgatttatcatccttgtca

SEQ ID NO: 4544 - RNA, 43 nt, synthetic construct
  source 1..43: mol_type = other RNA
agaaatccgtctttcattgacggatttatcatccttgtcaact

SEQ ID NO: 4545 - RNA, 43 nt, synthetic construct
  source 1..43: mol_type = other RNA
agaaatccgtctttcattgacggatcatccttgtcaactgtgc

SEQ ID NO: 4546 - RNA, 43 nt, synthetic construct
  source 1..43: mol_type = other RNA
agaaatccgtctttcattgacggtcatccttgtcaactgtgcc

SEQ ID NO: 4547 - RNA, 43 nt, synthetic construct
  source 1..43: mol_type = other RNA
agaaatccgtctttcattgacggtcaactgtgccacaagccgc

SEQ ID NO: 4548 - RNA, 43 nt, synthetic construct
  source 1..43: mol_type = other RNA
agaaatccgtctttcattgacggacattcatttcttcttaggc

SEQ ID NO: 4549 - RNA, 43 nt, synthetic construct
  source 1..43: mol_type = other RNA
agaaatccgtctttcattgacggatttcttcttaggcaggctg

SEQ ID NO: 4550 - RNA, 43 nt, synthetic construct
  source 1..43: mol_type = other RNA
agaaatccgtctttcattgacggcttcttaggcaggctgtctg

SEQ ID NO: 4551 - RNA, 43 nt, synthetic construct
  source 1..43: mol_type = other RNA
agaaatccgtctttcattgacggttcttaggcaggctgtctgt

SEQ ID NO: 4552 - RNA, 43 nt, synthetic construct
  source 1..43: mol_type = other RNA
agaaatccgtctttcattgacggttaggcaggctgtctgtctc

SEQ ID NO: 4553 - RNA, 43 nt, synthetic construct
  source 1..43: mol_type = other RNA
agaaatccgtctttcattgacggggcaggctgtctgtctctct

SEQ ID NO: 4554 - RNA, 43 nt, synthetic construct
  source 1..43: mol_type = other RNA
agaaatccgtctttcattgacggttattttctacctttctctc

SEQ ID NO: 4555 - RNA, 43 nt, synthetic construct
  source 1..43: mol_type = other RNA
agaaatccgtctttcattgacggttttctacctttctctcgaa

SEQ ID NO: 4556 - RNA, 43 nt, synthetic construct
  source 1..43: mol_type = other RNA
agaaatccgtctttcattgacggtctacctttctctcgaaggt

SEQ ID NO: 4557 - RNA, 43 nt, synthetic construct
  source 1..43: mol_type = other RNA
agaaatccgtctttcattgacggctacctttctctcgaaggtc

SEQ ID NO: 4558 - RNA, 43 nt, synthetic construct
  source 1..43: mol_type = other RNA
agaaatccgtctttcattgacggtacctttctctcgaaggtct

SEQ ID NO: 4559 - RNA, 43 nt, synthetic construct
  source 1..43: mol_type = other RNA
agaaatccgtctttcattgacggctctcgaaggtcttctgccg

SEQ ID NO: 4560 - RNA, 43 nt, synthetic construct
  source 1..43: mol_type = other RNA
agaaatccgtctttcattgacggtctcgaaggtcttctgccga

SEQ ID NO: 4561 - RNA, 43 nt, synthetic construct
  source 1..43: mol_type = other RNA
agaaatccgtctttcattgacggtgccgagtcctgcaatatga

SEQ ID NO: 4562 - RNA, 43 nt, synthetic construct
  source 1..43: mol_type = other RNA
agaaatccgtctttcattgacggtaaaaatccaattaagagag

SEQ ID NO: 4563 - DNA, 20 bp, Homo sapiens
  source 1..20: mol_type = unassigned DNA
tgccccatcactctctctta

SEQ ID NO: 4564 - DNA, 20 bp, Homo sapiens
  source 1..20: mol_type = unassigned DNA
attggatttttaaaattata

SEQ ID NO: 4565 - DNA, 20 bp, Homo sapiens
  source 1..20: mol_type = unassigned DNA
gatttttaaaattatattca

SEQ ID NO: 4566 - DNA, 20 bp, Homo sapiens
  source 1..20: mol_type = unassigned DNA
ttaaaattatattcatattg

SEQ ID NO: 4567 - DNA, 20 bp, Homo sapiens
  source 1..20: mol_type = unassigned DNA
taaaattatattcatattgc

SEQ ID NO: 4568 - DNA, 20 bp, Homo sapiens
  source 1..20: mol_type = unassigned DNA
aaaattatattcatattgca

SEQ ID NO: 4569 - DNA, 20 bp, Homo sapiens
  source 1..20: mol_type = unassigned DNA
aaattatattcatattgcag

SEQ ID NO: 4570 - DNA, 20 bp, Homo sapiens
  source 1..20: mol_type = unassigned DNA
tattcatattgcaggactcg

SEQ ID NO: 4571 - DNA, 20 bp, Homo sapiens
  source 1..20: mol_type = unassigned DNA
atattgcaggactcggcaga

SEQ ID NO: 4572 - DNA, 20 bp, Homo sapiens
  source 1..20: mol_type = unassigned DNA
caggactcggcagaagacct

SEQ ID NO: 4573 - DNA, 20 bp, Homo sapiens
  source 1..20: mol_type = unassigned DNA
gagagaaaggtagaaaataa

SEQ ID NO: 4574 - DNA, 20 bp, Homo sapiens
  source 1..20: mol_type = unassigned DNA
ggctctctgtgtgagcatgt

SEQ ID NO: 4575 - DNA, 20 bp, Homo sapiens
  source 1..20: mol_type = unassigned DNA
gctctctgtgtgagcatgtg

SEQ ID NO: 4576 - DNA, 20 bp, Homo sapiens
  source 1..20: mol_type = unassigned DNA
tggcacagttgacaaggatg

SEQ ID NO: 4577 - DNA, 20 bp, Homo sapiens
  source 1..20: mol_type = unassigned DNA
acaaggatgataaatcaata

SEQ ID NO: 4578 - DNA, 20 bp, Homo sapiens
  source 1..20: mol_type = unassigned DNA
ctatcatttatgaatagcaa

SEQ ID NO: 4579 - DNA, 20 bp, Homo sapiens
  source 1..20: mol_type = unassigned DNA
atgaatagcaatactgaaga

SEQ ID NO: 4580 - DNA, 20 bp, Homo sapiens
  source 1..20: mol_type = unassigned DNA
tgaatagcaatactgaagaa

SEQ ID NO: 4581 - DNA, 20 bp, Homo sapiens
  source 1..20: mol_type = unassigned DNA
aaacaaaagattgctgtctc

SEQ ID NO: 4582 - DNA, 20 bp, Homo sapiens
  source 1..20: mol_type = unassigned DNA
ctgtctcaatatatcttata

SEQ ID NO: 4583 - DNA, 20 bp, Homo sapiens
  source 1..20: mol_type = unassigned DNA
tatttattatttaccaaatt

SEQ ID NO: 4584 - DNA, 20 bp, Homo sapiens
  source 1..20: mol_type = unassigned DNA
aggaagaaatactcttagaa

SEQ ID NO: 4585 - DNA, 20 bp, Homo sapiens
  source 1..20: mol_type = unassigned DNA
gaataatttggtaaataata

SEQ ID NO: 4586 - DNA, 20 bp, Homo sapiens
  source 1..20: mol_type = unassigned DNA
ggtaaataataaatataaga

SEQ ID NO: 4587 - DNA, 20 bp, Homo sapiens
  source 1..20: mol_type = unassigned DNA
gtaaataataaatataagat

SEQ ID NO: 4588 - DNA, 20 bp, Homo sapiens
  source 1..20: mol_type = unassigned DNA
agacagcaatcttttgtttt

SEQ ID NO: 4589 - DNA, 20 bp, Homo sapiens
  source 1..20: mol_type = unassigned DNA
tgttttaatttcttcagtat

SEQ ID NO: 4590 - DNA, 20 bp, Homo sapiens
  source 1..20: mol_type = unassigned DNA
gttttaatttcttcagtatt

SEQ ID NO: 4591 - DNA, 20 bp, Homo sapiens
  source 1..20: mol_type = unassigned DNA
ttttaatttcttcagtattg

SEQ ID NO: 4592 - DNA, 20 bp, Homo sapiens
  source 1..20: mol_type = unassigned DNA
taatttcttcagtattgcta

SEQ ID NO: 4593 - DNA, 20 bp, Homo sapiens
  source 1..20: mol_type = unassigned DNA
aatttcttcagtattgctat

SEQ ID NO: 4594 - DNA, 20 bp, Homo sapiens
  source 1..20: mol_type = unassigned DNA
atttcttcagtattgctatt

SEQ ID NO: 4595 - DNA, 20 bp, Homo sapiens
  source 1..20: mol_type = unassigned DNA
cttcagtattgctattcata

SEQ ID NO: 4596 - DNA, 20 bp, Homo sapiens
  source 1..20: mol_type = unassigned DNA
ttcagtattgctattcataa

SEQ ID NO: 4597 - DNA, 20 bp, Homo sapiens
  source 1..20: mol_type = unassigned DNA
agtattgctattcataaatg

SEQ ID NO: 4598 - DNA, 20 bp, Homo sapiens
  source 1..20: mol_type = unassigned DNA
ctattcataaatgatagtaa

SEQ ID NO: 4599 - DNA, 20 bp, Homo sapiens
  source 1..20: mol_type = unassigned DNA
ataaatgatagtaagcttgc

SEQ ID NO: 4600 - DNA, 20 bp, Homo sapiens
  source 1..20: mol_type = unassigned DNA
cattattgatttatcatcct

SEQ ID NO: 4601 - DNA, 20 bp, Homo sapiens
  source 1..20: mol_type = unassigned DNA
ttgatttatcatccttgtca

SEQ ID NO: 4602 - DNA, 20 bp, Homo sapiens
  source 1..20: mol_type = unassigned DNA
atttatcatccttgtcaact

SEQ ID NO: 4603 - DNA, 20 bp, Homo sapiens
  source 1..20: mol_type = unassigned DNA
atcatccttgtcaactgtgc

SEQ ID NO: 4604 - DNA, 20 bp, Homo sapiens
  source 1..20: mol_type = unassigned DNA
tcatccttgtcaactgtgcc

SEQ ID NO: 4605 - DNA, 20 bp, Homo sapiens
  source 1..20: mol_type = unassigned DNA
tcaactgtgccacaagccgc

SEQ ID NO: 4606 - DNA, 20 bp, Homo sapiens
  source 1..20: mol_type = unassigned DNA
acattcatttcttcttaggc

SEQ ID NO: 4607 - DNA, 20 bp, Homo sapiens
  source 1..20: mol_type = unassigned DNA
atttcttcttaggcaggctg

SEQ ID NO: 4608 - DNA, 20 bp, Homo sapiens
  source 1..20: mol_type = unassigned DNA
cttcttaggcaggctgtctg

SEQ ID NO: 4609 - DNA, 20 bp, Homo sapiens
  source 1..20: mol_type = unassigned DNA
ttcttaggcaggctgtctgt

SEQ ID NO: 4610 - DNA, 20 bp, Homo sapiens
  source 1..20: mol_type = unassigned DNA
ttaggcaggctgtctgtctc

SEQ ID NO: 4611 - DNA, 20 bp, Homo sapiens
  source 1..20: mol_type = unassigned DNA
ggcaggctgtctgtctctct

SEQ ID NO: 4612 - DNA, 20 bp, Homo sapiens
  source 1..20: mol_type = unassigned DNA
ttattttctacctttctctc

SEQ ID NO: 4613 - DNA, 20 bp, Homo sapiens
  source 1..20: mol_type = unassigned DNA
ttttctacctttctctcgaa

SEQ ID NO: 4614 - DNA, 20 bp, Homo sapiens
  source 1..20: mol_type = unassigned DNA
tctacctttctctcgaaggt

SEQ ID NO: 4615 - DNA, 20 bp, Homo sapiens
  source 1..20: mol_type = unassigned DNA
ctacctttctctcgaaggtc

SEQ ID NO: 4616 - DNA, 20 bp, Homo sapiens
  source 1..20: mol_type = unassigned DNA
tacctttctctcgaaggtct

SEQ ID NO: 4617 - DNA, 20 bp, Homo sapiens
  source 1..20: mol_type = unassigned DNA
ctctcgaaggtcttctgccg

SEQ ID NO: 4618 - DNA, 20 bp, Homo sapiens
  source 1..20: mol_type = unassigned DNA
tctcgaaggtcttctgccga

SEQ ID NO: 4619 - DNA, 20 bp, Homo sapiens
  source 1..20: mol_type = unassigned DNA
tgccgagtcctgcaatatga

SEQ ID NO: 4620 - DNA, 20 bp, Homo sapiens
  source 1..20: mol_type = unassigned DNA
taaaaatccaattaagagag
